(19) United States
(12) Patent Application Publication
(10) Pub. No.: US 2004/0043929 A1
(43) Pub. Date: Mar. 4, 2004

(54) Novel proteins and nucleic acids encoding same

(76) Inventors: David W. Anderson, Branford, CT (US); Robert A. Ballinger, Newington, CT (US); Jason C. Baumgartner, New Haven, CT (US); Catherine E. Burgess, Wethersfield, CT (US); Stacie J. Casman, North Haven, CT (US); John S. Chant, Branford, CT (US); Constance Berghs, New Haven, CT (US); Esha A. Gangolli, Cambridge, MA (US); Shlomit R. Edinger, New Haven, CT (US); Karen Ellerman, Branford, CT (US); Katarzyna Furtak, Ansonia, CT (US); Valerie Gerlach, Branford, CT (US); Jennifer A. Gilbert, Madison, CT (US); Erik Gunther, Branford, CT (US); Linda Gorman, Branford, CT (US); Xiaojia Sasha Guo, Branford, CT (US); Weizhen Ji, Branford, CT (US); Li Li, Branford, CT (US); Xiaohong Liu, Lexington, MA (US); Charles E. Miller, Guilford, CT (US); Isabelle Millet, Milford, CT (US); Muralidhara Padigaru, Branford, CT (US); Meera Patturajan, Branford, CT (US); Luca Rastelli, Guilford, CT (US); John R. MacDougall, Hamden, CT (US); Vishnu Mishra, Gainesville, FL (US); Carol E.A. Pena, New Haven, CT (US); Steven K. Spaderna, Berlin, CT (US); Richard A. Shimkets, Guilford, CT (US); Glennda Smithson, Guilford, CT (US); Kimberly A. Spytek, New Haven, CT (US); David J. Stone, Guilford, CT (US); Suresh G. Shenoy, Branford, CT (US); Tatiana Ort, Milford, CT (US); Raymond J. Taupier JR., East Haven, CT (US); Velizar T. Tchernev, Branford, CT (US); Corine A.M. Vernet, Branford, CT (US); Adam R. Wolenc, New Haven, CT (US); Bryan D. Zerhusen, Branford, CT (US); Mei Zhong, Branford, CT (US)

Correspondence Address: MINTZ, LEVIN, COHN, FERRIS, GLOVSKY, AND POPEO, P.C., ONE FINANCIAL CENTER, BOSTON, MA, 02111, US

(21) Appl. No.: 10/336,472

(22) Filed: Jan. 3, 2003

Related U.S. Application Data
(63) Continuation-in-part of application No. 09/746,491, filed on Dec. 20, 2000.
(63) Continuation-in-part of application No. 10/005,041, filed on Dec. 4, 2001, now abandoned.
(63) Continuation-in-part of application No. 10/023,681, filed on Dec. 18, 2001.
(63) Continuation-in-part of application No. 10/024,212, filed on Dec. 18, 2001.
(63) Continuation-in-part of application No. 10/055,569, filed on Oct. 26, 2001.
(63) Continuation-in-part of application No. 10/080,334, filed on Feb. 21, 2002.
(63) Continuation-in-part of application No. 10/092,900, filed on Mar. 7, 2002.
(63) Continuation-in-part of application No. 10/136,826, filed on May 1, 2002.
(63) Continuation-in-part of application No. 10/236,417, filed on Sep. 6, 2002.
(60) Provisional application No. 60/345,092, filed on Jan. 4, 2002.
(60) Provisional application No. 60/345,219, filed on Jan. 4, 2002.
(60) Provisional application No. 60/348,804, filed on Jan. 14, 2002.
(60) Provisional application No. 60/349,182, filed on Jan. 16, 2002.
(60) Provisional application No. 60/349,733, filed on Jan. 17, 2002.
(60) Provisional application No. 60/349,839, filed on Jan. 17, 2002.
(60) Provisional application No. 60/350,263, filed on Jan. 18, 2002.
(60) Provisional application No. 60/351,977, filed on Jan. 24, 2002.
(60) Provisional application No. 60/354,783, filed on Feb. 5, 2002.
(60) Provisional application No. 60/358,629, filed on Feb. 21, 2002.
(60) Provisional application No. 60/359,860, filed on Feb. 27, 2002.
(60) Provisional application No. 60/385,969, filed on Jun. 5, 2002.
(60) Provisional application No. 60/389,531, filed on Jun. 18, 2002.
(60) Provisional application No. 60/389,604, filed on Jun. 18, 2002.
(60) Provisional application No. 60/402,150, filed on Aug. 9, 2002.
(60) Provisional application No. 60/402,834, filed on Aug. 12, 2002.
(60) Provisional application No. 60/402,867, filed on Aug. 12, 2002.
(60) Provisional application No. 60/406,398, filed on Aug. 27, 2002.

(51) Int. Cl. C12Q 1/68; A61K 38/17; C12P 21/02; C12N 5/06; C07K 14/47; C07H 21/04; C12N 9/00

(52) U.S. Cl. 514/12; 435/6; 435/69.1; 435/183; 435/320.1; 435/325; 530/350; 536/23.2

(57) ABSTRACT

The present invention provides novel isolated polynucleotides and small molecule target polypeptides encoded by the polynucleotides. Antibodies that immunospecifically bind to a novel small molecule target polypeptide or any derivative, variant, mutant or fragment of that polypeptide, polynucleotide or antibody are disclosed, as are methods in which the small molecule target polypeptide, polynucleotide and antibody are utilized in the detection and treatment of a broad range of pathological states. More specifically, the present invention discloses methods of using recombinantly expressed and/or endogenously expressed proteins in various screening procedures for the purpose of identifying therapeutic antibodies and therapeutic small molecules associated with diseases. The invention further discloses therapeutic, diagnostic and research methods for diagnosis, treatment, and prevention of disorders involving any one of these novel human nucleic acids and proteins.

### RELATED APPLICATIONS

[0001] This application is a continuation-in-part application of U.S. Ser. No. 09/746,491, filed on Dec. 20, 2000; U.S. Ser. No. 10/005,041, filed Dec. 4, 2001; U.S. Ser. No. 10/023,681, filed Dec. 18, 2001; U.S. Ser. No. 10/024,212, filed Dec. 18, 2001; U.S. Ser. No. 10/055,569, filed Oct. 26, 2001; U.S. Ser. No. 10/080,334, filed Feb. 21, 2002; U.S. Ser. No. 10/092,900, filed Mar. 7, 2002; U.S. Ser. No. 10/136,826, filed May 1, 2002; U.S. Ser. No. 10/236,417v, filed Sep. 6, 2002; and claims priority to provisional patent applications U.S. S. No. 60/345,092, filed Jan. 4, 2002; U.S. S. No. 60/345,219, filed Jan. 4, 2002; U.S. S. No. 60/348,804, filed Jan. 14, 2002; U.S. S. No. 60/349,182, filed Jan. 16, 2002; U.S. S. No. 60/349,733, filed Jan. 17, 2002; U.S. S. No. 60/349,839, filed Jan. 17, 2002; U.S. S. No. 60/350,263, filed Jan. 18, 2002; U.S. S. No. 60/351,977, filed Jan. 24, 2002; U.S. S. No. 60/354,783, filed Feb. 5, 2002; U.S. S. No. 60/358,629, filed Feb. 21, 2002; and U.S. S. No. 60/359,860, filed Feb. 27, 2002; U.S. S. No. 60/385,969, filed Jun. 5, 2002; U.S. S. No. 60/389,531, filed on Jun. 18, 2002; U.S. S. No. 60/389,604, filed on Jun. 18, 2002; U.S. S. No. 60/402,150, filed Aug. 9, 2002; U.S. S. No. 60/402,834, filed Aug. 12, 2002; U.S. S. No. 60/402,867, filed Aug. 12, 2002; and U.S. S. No. 60/406,398, filed Aug. 27, 2002; each of which is incorporated herein by reference in its entirety.

### FIELD OF TIHE INVENTION

[0002] The present invention relates to novel polypeptides that are targets of small molecule drugs and that have properties related to stimulation of biochemical or physiological responses in a cell, a tissue, an organ or an organism. More particularly, the novel polypeptides are gene products of novel genes, or are specified biologically active fragments or derivatives thereof. Methods of use encompass diagnostic and prognostic assay procedures as well as methods of treating diverse pathological conditions.

### BACKGROUND

[0003] Eukaryotic cells are characterized by biochemical and physiological processes which under normal conditions are exquisitely balanced to achieve the preservation and propagation of the cells. When such cells are components of multicellular organisms such as vertebrates, or more particularly organisms such as mammals, the regulation of the biochemical and physiological processes involves intricate signaling pathways. Frequently, such signaling pathways involve extracellular signaling proteins, cellular receptors that bind the signaling proteins and signal transducing components located within the cells.

[0004] Signaling proteins may be classified as endocrine effectors, paracrine effectors or autocrine effectors. Endocrine effectors are signaling molecules secreted by a given organ into the circulatory system, which are then transported to a distant target organ or tissue. The target cells include the receptors for the endocrine effector, and when the endocrine effector binds, a signaling cascade is induced. Paracrine effectors involve secreting cells and receptor cells in close proximity to each other, for example two different classes of cells in the same tissue or organ. One class of cells secretes the paracrine effector, which then reaches the second class of cells, for example by diffusion through the extracellular fluid. The second class of cells contains the receptors for the paracrine effector; binding of the effector results in induction of the signaling cascade that elicits the corresponding biochemical or physiological effect. Autocrine effectors are highly analogous to paracrine effectors, except that the same cell type that secretes the autocrine effector also contains the receptor. Thus the autocrine effector binds to receptors on the same cell, or on identical neighboring cells. The binding process then elicits the characteristic biochemical or physiological effect.

[0005] Signaling processes may elicit a variety of effects on cells and tissues including by way of nonlimiting example induction of cell or tissue proliferation, suppression of growth or proliferation, induction of differentiation or maturation of a cell or tissue, and suppression of differentiation or maturation of a cell or tissue.

[0006] Many pathological conditions involve dysregulation of expression of important effector proteins. In certain classes of pathologies the dysregulation is manifested as diminished or suppressed level of synthesis and secretion of protein effectors. In other classes of pathologies the dysregulation is manifested as increased or up-regulated level of synthesis and secretion of protein effectors. In a clinical setting a subject may be suspected of suffering from a condition brought on by altered or mis-regulated levels of a protein effector of interest. Therefore there is a need to assay for the level of the protein effector of interest in a biological sample from such a subject, and to compare the level with that characteristic of a nonpathological condition. There also is a need to provide the protein effector as a product of manufacture. Administration of the effector to a subject in need thereof is useful in treatment of the pathological condition. Accordingly, there is a need for a method of treatment of a pathological condition brought on by a diminished or suppressed levels of the protein effector of interest. In addition, there is a need for a method of treatment of a pathological condition brought on by a increased or up-regulated levels of the protein effector of interest.

[0007] Small molecule targets have been implicated in various disease states or pathologies. These targets may be proteins, and particularly enzymatic proteins, which are acted upon by small molecule drugs for the purpose of altering target function and achieving a desired result. Cellular, animal and clinical studies can be performed to elucidate the genetic contribution to the etiology and pathogenesis of conditions in which small molecule targets are implicated in a variety of physiologic, pharmacologic or native states. These studies utilize the core technologies at CuraGen Corporation to look at differential gene expression, protein-protein interactions, large-scale sequencing of expressed genes and the association of genetic variations such as, but not limited to, single nucleotide polymorphisms (SNPs) or splice variants in and between biological samples from experimental and control groups. The goal of such studies is to identify potential avenues for therapeutic intervention in order to prevent, treat the consequences or cure the conditions.

[0008] In order to treat diseases, pathologies and other abnormal states or conditions in which a mammalian organism has been diagnosed as being, or as being at risk for becoming, other than in a normal state or condition, it is important to identify new therapeutic agents. Such a procedure includes at least the steps of identifying a target component within an affected tissue or organ, and identifying a candidate therapeutic agent that modulates the functional attributes of the target. The target component may be any biological macromolecule implicated in the disease or pathology. Commonly-the target is a polypeptide or protein with specific functional attributes. Other classes of macromolecule may be a nucleic acid, a polysaccharide, a lipid such as a complex lipid or a glycolipid; in addition a target may be a sub-cellular structure or extra-cellular structure that is comprised of more than one of these classes of macromolecule. Once such a target has been identified, it may be employed in a screening assay in order to identify favorable candidate therapeutic agents from among a large population of substances or compounds.

[0009] In many cases the objective of such screening assays is to identify small molecule candidates; this is commonly approached by the use of combinatorial methodologies to develop the population of substances to be tested. The implementation of high throughput screening methodologies is advantageous when working with large, combinatorial libraries of compounds.

### SUMMARY OF THE INVENTION

[0010] The invention includes nucleic acid sequences and the novel polypeptides they encode. The novel nucleic acids and polypeptides are referred to herein as NOVX, or NOV1, NOV2, NOV3, etc., nucleic acids and polypeptides. These nucleic acids and polypeptides, as well as derivatives, homologs, analogs and fragments thereof, will hereinafter be collectively designated as “NOVX” nucleic acid, which represents the nucleotide sequence selected from the group consisting of SEQ ID NO: 2n-1, wherein n is an integer between 1 and 66, or polypeptide sequences, which represents the group consisting of SEQ ID NO: 2n, wherein n is an integer between 1 and 66.

[0011] In one aspect, the invention provides an isolated polypeptide comprising a mature form of a NOVX amino acid. One example is a variant of a mature form of a NOVX amino acid sequence, wherein any amino acid in the mature form is changed to a different amino acid, provided that no more than 15% of the amino acid residues in the sequence of the mature form are so changed. The amino acid can be, for example, a NOVX amino acid sequence or a variant of a NOVX amino acid sequence, wherein any amino acid specified in the chosen sequence is changed to a different amino acid, provided that no more than 15% of the amino acid residues in the sequence are so changed. The invention also includes fragments of any of these. In another aspect, the invention also includes an isolated nucleic acid that encodes a NOVX polypeptide, or a fragment, homolog, analog or derivative thereof.

[0012] Also included in the invention is a NOVX polypeptide that is a naturally occurring allelic variant of a NOVX sequence. In one embodiment, the allelic variant includes an amino acid sequence that is the translation of a nucleic acid sequence differing by a single nucleotide from a NOVX nucleic acid sequence. In another embodiment, the NOVX polypeptide is a variant polypeptide described therein, wherein any amino acid specified in the chosen sequence is changed to provide a conservative substitution. In one embodiment, the invention discloses a method for determining the presence or amount of the NOVX polypeptide in a sample. The method involves the steps of: providing a sample; introducing the sample to an antibody that binds immunospecifically to the polypeptide; and determining the presence or amount of antibody bound to the NOVX polypeptide, thereby determining the presence or amount of the NOVX polypeptide in the sample. In another embodiment, the invention provides a method for determining the presence of or predisposition to a disease associated with altered levels of a NOVX polypeptide in a mammalian subject. This method involves the steps of: measuring the level of expression of the polypeptide in a sample from the first mammalian subject; and comparing the amount of the polypeptide in the sample of the first step to the amount of the polypeptide present in a control sample from a second mammalian subject known not to have, or not to be predisposed to, the disease, wherein an alteration in the expression level of the polypeptide in the first subject as compared to the control sample indicates the presence of or predisposition to the disease.

[0013] In a further embodiment, the invention includes a method of identifying an agent that binds to a NOVX polypeptide. This method involves the steps of: introducing the polypeptide to the agent; and determining whether the agent binds to the polypeptide. In various embodiments, the agent is a cellular receptor or a downstream effector.

[0014] In another aspect, the invention provides a method for identifying a potential therapeutic agent for use in treatment of a pathology, wherein the pathology is related to aberrant expression or aberrant physiological interactions of a NOVX polypeptide. The method involves the steps of: providing a cell expressing the NOVX polypeptide and having a property or function ascribable to the polypeptide; contacting the cell with a composition comprising a candidate substance; and determining whether the substance alters the property or function ascribable to the polypeptide; whereby, if an alteration observed in the presence of the substance is not observed when the cell is contacted with a composition devoid of the substance, the substance is identified as a potential therapeutic agent. In another aspect, the invention describes a method for screening for a modulator of activity or of latency or predisposition to a pathology associated with the NOVX polypeptide. This method involves the following steps: administering a test compound to a test animal at increased risk for a pathology associated with the NOVX polypeptide, wherein the test animal recombinantly expresses the NOVX polypeptide. This method involves the steps of measuring the activity of the NOVX polypeptide in the test animal after administering the compound of step; and comparing the activity of the protein in the test animal with the activity of the NOVX polypeptide in a control animal not administered the polypeptide, wherein a change in the activity of the NOVX polypeptide in the test animal relative to the control animal indicates the test compound is a modulator of latency of, or predisposition to, a pathology associated with the NOVX polypeptide. In one embodiment, the test animal is a recombinant test animal that expresses a test protein transgene or expresses the transgene under the control of a promoter at an increased level relative to a wild-type test animal, and wherein the promoter is not the native gene promoter of the transgene. In another aspect, the invention includes a method for modulating the activity of the NOVX polypeptide, the method comprising introducing a cell sample expressing the NOVX polypeptide with a compound that binds to the polypeptide in an amount sufficient to modulate the activity of the polypeptide.

[0015] The invention also includes an isolated nucleic acid that encodes a NOVX polypeptide, or a fragment, homolog, analog or derivative thereof. In a preferred embodiment, the nucleic acid molecule comprises the nucleotide sequence of a naturally occurring allelic nucleic acid variant. In another embodiment, the nucleic acid encodes a variant polypeptide, wherein the variant polypeptide has the polypeptide sequence of a naturally occurring polypeptide variant. In another embodiment, the nucleic acid molecule differs by a single nucleotide from a NOVX nucleic acid sequence. In one embodiment, the NOVX nucleic acid molecule hybridizes under stringent conditions to the nucleotide sequence selected from the group consisting of SEQ ID NO: 2n-1, wherein n is an integer between 1 and 66, or a complement of the nucleotide sequence. In another aspect, the invention provides a vector or a cell expressing a NOVX nucleotide sequence.

[0016] In one embodiment, the invention discloses a method for modulating the activity of a NOVX polypeptide. The method includes the steps of: introducing a cell sample expressing the NOVX polypeptide with a compound that binds to the polypeptide in an amount sufficient to modulate the activity of the polypeptide. In another embodiment, the invention includes an isolated NOVX nucleic acid molecule comprising a nucleic acid sequence encoding a polypeptide comprising a NOVX amino acid sequence or a variant of a mature form of the NOVX amino acid sequence, wherein any amino acid in the mature form of the chosen sequence is changed to a different amino acid, provided that no more than 15% of the amino acid residues in the sequence of the mature form are so changed. In another embodiment, the invention includes an amino acid sequence that is a variant of the NOVX amino acid sequence, in which any amino acid specified in the chosen sequence is changed to a different amino acid, provided that no more than 15% of the amino acid residues in the sequence are so changed.

[0017] In one embodiment, the invention discloses a NOVX nucleic acid fragment encoding at least a portion of a NOVX polypeptide or any variant of the polypeptide, wherein any amino acid of the chosen sequence is changed to a different amino acid, provided that no more than 10% of the amino acid residues in the sequence are so changed. In another embodiment, the invention includes the complement of any of the NOVX nucleic acid molecules or a naturally occurring allelic nucleic acid variant. In another embodiment, the invention discloses a NOVX nucleic acid molecule that encodes a variant polypeptide, wherein the variant polypeptide has the polypeptide sequence of a naturally occurring polypeptide variant. In another embodiment, the invention discloses a NOVX nucleic acid, wherein the nucleic acid molecule differs by a single nucleotide from a NOVX nucleic acid sequence.

[0018] In another aspect, the invention includes a NOVX nucleic acid, wherein one or more nucleotides in the NOVX nucleotide sequence is changed to a different nucleotide provided that no more than 15% of the nucleotides are so changed. In one embodiment, the invention discloses a nucleic acid fragment of the NOVX nucleotide sequence and a nucleic acid fragment wherein one or more nucleotides in the NOVX nucleotide sequence is changed from that selected from the group consisting of the chosen sequence to a different nucleotide provided that no more than 15% of the nucleotides are so changed. In another embodiment, the invention includes a nucleic acid molecule wherein the nucleic acid molecule hybridizes under stringent conditions to a NOVX nucleotide sequence or a complement of the NOVX nucleotide sequence. In one embodiment, the invention includes a nucleic acid molecule, wherein the sequence is changed such that no more than 15% of the nucleotides in the coding sequence differ from the NOVX nucleotide sequence or a fragment thereof.

[0019] In a further aspect, the invention includes a method for determining the presence or amount of the NOVX nucleic acid in a sample. The method involves the steps of: providing the sample; introducing the sample to a probe that binds to the nucleic acid molecule; and determining the presence or amount of the probe bound to the NOVX nucleic acid molecule, thereby determining the presence or amount of the NOVX nucleic acid molecule in the sample. In one embodiment, the presence or amount of the nucleic acid molecule is used as a marker for cell or tissue type.

[0020] In another aspect, the invention discloses a method for determining the presence of or predisposition to a disease associated with altered levels of the NOVX nucleic acid molecule of in a first mammalian subject. The method involves the steps of: measuring the amount of NOVX nucleic acid in a sample from the first mammalian subject; and comparing the amount of the nucleic acid in the sample of step (a) to the amount of NOVX nucleic acid present in a control sample from a second mammalian subject known not to have or not be predisposed to, the disease; wherein an alteration in the level of the nucleic acid in the first subject as compared to the control sample indicates the presence of or predisposition to the disease.

[0021] In an aspect, the present invention provides a method of identifying a candidate therapeutic agent for treating a disease, pathology, or an abnormal state or condition using a target entity having a specific association with the disease. This method includes:

[0022] (1) identification of a target biopolymer associated with the disease, pathology, or abnormal state or condition;

[0023] (2) contacting the biopolymer with at least one chemical compound; and

[0024] (3) identifying a compound that binds to the biopolymer as a candidate therapeutic agent.

[0025] In some embodiments of this method, the chemical compound is a member of a combinatorial library of compounds; the contacting in step (b) is conducted on one or more replicate samples of the biopolymer; and the replicate sample is contacted with at least one member of the combinatorial library. In additional embodiments of this method, the biopolymer is included within a cell and is functionally expressed therein. In still a further advantageous embodiment, the binding of the compound modulates the function of the biopolymer, and it is the modulation that provides the identification that the compound is a potential therapeutic agent. In yet further significant embodiments of this method, the target biopolymer is a polypeptide.

[0026] In a second aspect of the invention, a method for identifying a pharmaceutical agent for treating a disease, pathology, or an abnormal state or condition is provided. The second method includes the steps of:

[0027] (1) identifying a candidate therapeutic agent for treating said disease, pathology, or abnormal state or condition by the method described in the preceding paragraph;

[0028] (2) contacting a biological sample associated with the disease, pathology, or abnormal state or condition with the candidate therapeutic agent;

[0029] (3) determining whether the candidate induces an effect on the biological sample associated with a therapeutic response therein; and

[0030] (4) identifying a candidate exerting such an effect as a pharmaceutical agent.

[0031] In some embodiments of the second method, the biological sample includes a cell, a tissue or organ, or is a nonhuman mammal.

[0032] The present invention discloses novel associations of proteins and polypeptides and the nucleic acids that encode them with various diseases or pathologies. The proteins and related proteins that are similar to them, are encoded by a cDNA and/or by genomic DNA. The proteins, polypeptides and their cognate nucleic acids were identified by CuraGen Corporation in certain cases. The human Sulfonylurea 2A protein encoded by CG154077 and any variants, thereof, are suitable as diagnostic markers, targets for an antibody therapeutic and targets for small molecule drugs. As such the current invention embodies the use of recombinantly expressed and/or endogenously expressed protein in various screens to identify such therapeutic antibodies and/or therapeutic small molecules.

[0033] Unless otherwise defined, all technical and scientific terms used herein have the same meaning as commonly understood by one of ordinary skill in the art to which this invention belongs. Although methods and materials similar or equivalent to those described herein can be used in the practice or testing of the present invention, suitable methods and materials are described below. All publications, patent applications, patents, and other references mentioned herein are incorporated by reference in their entirety. In the case of conflict, the present specification, including definitions, will control. In addition, the materials, methods, and examples are illustrative only and not intended to be limiting.

[0034] Other features and advantages of the invention will be apparent from the following detailed description and claims.

### DETAILED DESCRIPTION OF THE INVENTION

[0035] The present invention provides novel nucleotides and polypeptides encoded thereby. Included in the invention are the novel nucleic acid sequences, their encoded polypeptides, antibodies, and other related compounds. The sequences are collectively referred to herein as “NOVX nucleic acids” or “NOVX polynucleotides” and the corresponding encoded polypeptides are referred to as “NOVX polypeptides” or “NOVX proteins.” Unless indicated otherwise, “NOVX” is meant to refer to any of the novel sequences disclosed herein. Table A provides a summary of the NOVX nucleic acids and their encoded polypeptides.

TABLE A
SEQUENCES AND CORRESPONDING SEQ ID NUMBERS

| | | SEQ ID NO | SEQ ID NO | |
|---|---|---|---|---|
| NOVX | Internal | (nucleic | (amino | |
| Assignment | Identification | acid) | acid) | Homology |
| NOV1a | CG108945-01 | 1 | 2 | Human Protein |
| NOV1b | CG108945-02 | 3 | 4 | Human Protein |
| NOV2a | CG112559-03 | 5 | 6 | Ubiquinone |
| NOV2b | CG112559-02 | 7 | 8 | Ubiquinone |
| NOV2c | CG112559-01 | 9 | 10 | Ubiquinone |
| NOV3a | CG115757-01 | 11 | 12 | Dynactin |
| NOV3b | CG115757-02 | 13 | 14 | Dynactin |
| NOV4a | CG120781-01 | 15 | 16 | Myosin heavy chain |
| NOV4b | CG120781-03 | 17 | 18 | Myosin heavy chain |
| NOV4c | CG120781-04 | 19 | 20 | Myosin heavy chain |
| NOV4d | CG120781-02 | 21 | 22 | Myosin heavy chain |
| NOV5a | CG122634-01 | 23 | 24 | Kinesin heavy chain |
| NOV6a | CG125312-01 | 25 | 26 | Myosin |
| NOV7a | CG134632-01 | 27 | 28 | dUTP pyrophosphatase |
| NOV7b | CG134632-02 | 29 | 30 | dUTP pyrophosphatase |
| NOV7c | CG134632-03 | 31 | 32 | dUTP pyrophosphatase |
| NOV8a | CG148411-01 | 33 | 34 | multicatalytic endopeptidase |
| | | | | complex |
| NOV8b | CG148411-02 | 35 | 36 | multicatalytic endopeptidase |
| | | | | complex |
| NOV9a | CG154077-01 | 37 | 38 | Sulfonylurea receptor 2 |
| NOV10a | CG155759-02 | 39 | 40 | Seven transmembrane helix receptor |
| NOV10b | CG155759-01 | 41 | 42 | Seven transmembrane helix receptor |
| NOV11a | CG155882-01 | 43 | 44 | Seven transmembrane helix receptor |
| NOV12a | CG159399-01 | 45 | 46 | WUGSC:H_DJ0539M06.4 protein |
| NOV12b | CG159399-02 | 47 | 48 | WUGSC:H_DJ0539M06.4 protein |
| NOV13a | CG167853-01 | 49 | 50 | Cytoplasmic acetyl-CoA hydrolase 1 |
| NOV14a | CG167873-01 | 51 | 52 | P2X purinoceptor 5 |
| NOV14b | CG167873-02 | 53 | 54 | P2X purinoceptor 5 |
| NOV15a | CG167893-01 | 55 | 56 | Human Protein |
| NOV16a | CG169088-01 | 57 | 58 | Ca2 + transporting ATPase |
| NOV17a | CG169201-01 | 59 | 60 | ATPase |
| NOV18a | CG50303-01 | 61 | 62 | Seven transmembrane helix receptor |
| NOV18b | CG50303-03 | 63 | 64 | Seven transmembrane helix receptor |
| NOV18c | 276863879 | 65 | 66 | Seven transmembrane helix receptor |
| NOV18d | 276863902 | 67 | 68 | Seven transmembrane helix receptor |
| NOV18e | CG50303-01 | 69 | 70 | Seven transmembrane helix receptor |
| NOV18f | CG50303-02 | 71 | 72 | Seven transmembrane helix receptor |
| NOV19a | CG54092-03 | 73 | 74 | GTPase regulator |
| NOV19b | CG54092-01 | 75 | 76 | GTPase regulator |
| NOV19c | CG54092-03 | 77 | 78 | GTPase regulator |
| NOV19d | 262770591 | 79 | 80 | GTPase regulator |
| NOV19e | 262770609 | 81 | 82 | GTPase regulator |
| NOV19f | 296457330 | 83 | 84 | GTPase regulator |
| NOV19g | CG54092-02 | 85 | 86 | GTPase regulator |
| NOV20a | CG55798-04 | 87 | 88 | G-protein coupled receptor |
| NOV20b | CG55798-02 | 89 | 90 | G-protein coupled receptor |
| NOV20c | 265722099 | 91 | 92 | G-protein coupled receptor |
| NOV20d | 265725302 | 93 | 94 | G-protein coupled receptor |
| NOV20e | CG55798-01 | 95 | 96 | G-protein coupled receptor |
| NOV20f | CG55798-03 | 97 | 98 | G-protein coupled receptor |
| NOV21a | CG55838-05 | 99 | 100 | Mitogen-activated protein kinase |
| | | | | kinase 2 |
| NOV21b | CG55838-03 | 101 | 102 | Mitogen-activated protein kinase |
| | | | | kinase 2 |
| NOV21c | CG55838-02 | 103 | 104 | Mitogen-activated protein kinase |
| | | | | kinase 2 |
| NOV21d | 309394046 | 105 | 106 | Mitogen-activated protein kinase |
| | | | | kinase 2 |
| NOV21e | CG55838-04 | 107 | 108 | Mitogen-activated protein kinase |
| | | | | kinase 2 |
| NOV21f | CG55838-01 | 109 | 110 | Mitogen-activated protein kinase |
| | | | | kinase 2 |
| NOV21g | CG55838-06 | 111 | 112 | Mitogen-activated protein kinase |
| | | | | kinase 2 |
| NOV22a | CG56618-02 | 113 | 114 | Heat shock protein |
| NOV22b | CG56618-03 | 115 | 116 | Heat shock protein |
| NOV22c | CG56618-04 | 117 | 118 | Heat shock protein |
| NOV22d | CG56618-01 | 119 | 120 | Heat shock protein |
| NOV23a | CG57509-01 | 121 | 122 | Calpain |
| NOV23b | CG57509-02 | 123 | 124 | Calpain |
| NOV24a | CG59522-02 | 125 | 126 | Human protein |
| NOV24b | CG59522-01 | 127 | 128 | Human protein |
| NOV25a | CG90474-02 | 129 | 130 | Human uncoupling protein |
| NOV25b | CG90474-01 | 131 | 132 | Human uncoupling protein |

[0036] Table A indicates the homology of NOVX polypeptides to known protein families. Thus, the nucleic acids and polypeptides, antibodies and related compounds according to the invention corresponding to a NOVX as identified in column 1 of Table A will be useful in therapeutic and diagnostic applications implicated in, for example, pathologies and disorders associated with the known protein families identified in column 5 of Table A.

[0037] Pathologies, diseases, disorders and condition and the like that are associated with NOVX sequences include, but are not limited to, e.g., cardiomyopathy, atherosclerosis, hypertension, congenital heart defects, aortic stenosis, atrial septal defect (ASD), atrioventricular (A-V) canal defect, ductus arteriosus, pulmonary stenosis, subaortic stenosis, ventricular septal defect (VSD), valve diseases, tuberous sclerosis, scleroderma, obesity, metabolic disturbances associated with obesity, transplantation, adrenoleukodystrophy, congenital adrenal hyperplasia, prostate cancer, diabetes, metabolic disorders, neoplasm; adenocarcinoma, lymphoma, uterus cancer, fertility, hemophilia, hypercoagulation, idiopathic thrombocytopenic purpura, immunodeficiencies, graft versus host disease, AIDS, bronchial asthma, Crohn's disease; multiple sclerosis, treatment of Albright Hereditary Ostoeodystrophy, infectious disease, anorexia, cancer-associated cachexia, cancer, neurodegenerative disorders, Alzheimer's Disease, Parkinson's Disorder, immune disorders, hematopoietic disorders, and the various dyslipidemias, the metabolic syndrome X and wasting disorders associated with chronic diseases and various cancers, as well as conditions such as transplantation and fertility.

[0038] NOVX nucleic acids and their encoded polypeptides are useful in a variety of applications and contexts. The various NOVX nucleic acids and polypeptides according to the invention are useful as novel members of the protein families according to the presence of domains and sequence relatedness to previously described proteins. Additionally, NOVX nucleic acids and polypeptides can also be used to identify proteins that are members of the family to which the NOVX polypeptides belong.

[0039] Consistent with other known members of the family of proteins, identified in column 5 of Table A, the NOVX polypeptides of the present invention show homology to, and contain domains that are characteristic of, other members of such protein families. Details of the sequence relatedness and domain analysis for each NOVX are presented in Example A.

[0040] The NOVX nucleic acids and polypeptides can also be used to screen for molecules, which inhibit or enhance NOVX activity or function. Specifically, the nucleic acids and polypeptides according to the invention may be used as targets for the identification of small molecules that modulate or inhibit diseases associated with the protein families listed in Table A.

[0041] The NOVX nucleic acids and polypeptides are also useful for detecting specific cell types. Details of the expression analysis for each NOVX are presented in Example C. Accordingly, the NOVX nucleic acids, polypeptides, antibodies and related compounds according to the invention will have diagnostic and therapeutic applications in the detection of a variety of diseases with differential expression in normal vs. diseased tissues, e.g. detection of a variety of cancers. SNP analysis for each NOVX, if applicable, is presented in Example D.

[0042] Additional utilities for NOVX nucleic acids and polypeptides according to the invention are disclosed herein.

[0043] NOVX Clones

[0044] NOVX nucleic acids and their encoded polypeptides are useful in a variety of applications and contexts. The various NOVX nucleic acids and polypeptides according to the invention are useful as novel members of the protein families according to the presence of domains and sequence relatedness to previously described proteins. Additionally, NOVX nucleic acids and polypeptides can also be used to identify proteins that are members of the family to which the NOVX polypeptides belong.

[0045] The NOVX genes and their corresponding encoded proteins are useful for preventing, treating or ameliorating medical conditions, e.g., by protein or gene therapy. Pathological conditions can be diagnosed by determining the amount of the new protein in a sample or by determining the presence of mutations in the new genes. Specific uses are described for each of the NOVX genes, based on the tissues in which they are most highly expressed. Uses include developing products for the diagnosis or treatment of a variety of diseases and disorders.

[0046] The NOVX nucleic acids and proteins of the invention are useful in potential diagnostic and therapeutic applications and as a research tool. These include serving as a specific or selective nucleic acid or protein diagnostic and/or prognostic marker, wherein the presence or amount of the nucleic acid or the protein are to be assessed, as well as potential therapeutic applications such as the following: (i) a protein therapeutic, (ii) a small molecule drug target, (iii) an antibody target (therapeutic, diagnostic, drug targeting/cytotoxic antibody), (iv) a nucleic acid useful in gene therapy (gene delivery/gene ablation), and (v) a composition promoting tissue regeneration in vitro and in vivo (vi) a biological defense weapon.

[0047] In one specific embodiment, the invention includes an isolated polypeptide comprising an amino acid sequence selected from the group consisting of: (a) a mature form of the amino acid sequence selected from the group consisting of SEQ ID NO: 2n, wherein n is an integer between 1 and 66; (b) a variant of a mature form of the amino acid sequence selected from the group consisting of SEQ ID NO: 2n, wherein n is an integer between 1 and 66, wherein any amino acid in the mature form is changed to a different amino acid, provided that no more than 15% of the amino acid residues in the sequence of the mature form are so changed; (c) an amino acid sequence selected from the group consisting of SEQ ID NO: 2n, wherein n is an integer between 1 and 66; (d) a variant of the amino acid sequence selected from the group consisting of SEQ ID NO:2n, wherein n is an integer between 1 and 66 wherein any amino acid specified in the chosen sequence is changed to a different amino acid, provided that no more than 15% of the amino acid residues in the sequence are so changed; and (e) a fragment of any of (a) through (d).

[0048] In another specific embodiment, the invention includes an isolated nucleic acid molecule comprising a nucleic acid sequence encoding a polypeptide comprising an amino acid sequence selected from the group consisting of: (a) a mature form of the amino acid sequence given SEQ ID NO: 2n, wherein n is an integer between 1 and 66; (b) a variant of a mature form of the amino acid sequence selected from the group consisting of SEQ ID NO: 2n, wherein n is an integer between 1 and 66 wherein any amino acid in the mature form of the chosen sequence is changed to a different amino acid, provided that no more than 15% of the amino acid residues in the sequence of the mature form are so changed; (c) the amino acid sequence selected from the group consisting of SEQ ID NO: 2n, wherein n is an integer between 1 and 66; (d) a variant of the amino acid sequence selected from the group consisting of SEQ ID NO: 2n, wherein n is an integer between 1 and 66, in which any amino acid specified in the chosen sequence is changed to a different amino acid, provided that no more than 15% of the amino acid residues in the sequence are so changed; (e) a nucleic acid fragment encoding at least a portion of a polypeptide comprising the amino acid sequence selected from the group consisting of SEQ ID NO: 2n, wherein n is an integer between 1 and 66 or any variant of said polypeptide wherein any amino acid of the chosen sequence is changed to a different amino acid, provided that no more than 10% of the amino acid residues in the sequence are so changed; and (f) the complement of any of said nucleic acid molecules.

[0049] In yet another specific embodiment, the invention includes an isolated nucleic acid molecule, wherein said nucleic acid molecule comprises a nucleotide sequence selected from the group consisting of: (a) the nucleotide sequence selected from the group consisting of SEQ ID NO: 2n-1, wherein n is an integer between 1 and 66; (b) a nucleotide sequence wherein one or more nucleotides in the nucleotide sequence selected from the group consisting of SEQ ID NO: 2n-1, wherein n is an integer between 1 and 66 is changed from that selected from the group consisting of the chosen sequence to a different nucleotide provided that no more than 15% of the nucleotides are so changed; (c) a nucleic acid fragment of the sequence selected from the group consisting of SEQ ID NO: 2n-1, wherein n is an integer between 1 and 66; and (d) a nucleic acid fragment wherein one or more nucleotides in the nucleotide sequence selected from the group consisting of SEQ ID NO: 2n-1, wherein n is an integer between 1 and 66 is changed from that selected from the group consisting of the chosen sequence to a different nucleotide provided that no more than 15% of the nucleotides are so changed.

[0050] NOVX Nucleic Acids and Polypeptides

[0051] One aspect of the invention pertains to isolated nucleic acid molecules that encode NOVX polypeptides or biologically active portions thereof. Also included in the invention are nucleic acid fragments sufficient for use as hybridization probes to identify NOVX-encoding nucleic acids (e.g., NOVX mRNAs) and fragments for use as PCR primers for the amplification and/or mutation of NOVX nucleic acid molecules. As used herein, the term “nucleic acid molecule” is intended to include DNA molecules (e.g., cDNA or genomic DNA), RNA molecules (e.g., mRNA), analogs of the DNA or RNA generated using nucleotide analogs, and derivatives, fragments and homologs thereof. The nucleic acid molecule may be single-stranded or double-stranded, but preferably is comprised double-stranded DNA.

[0052] A NOVX nucleic acid can encode a mature NOVX polypeptide. As used herein, a “mature” form of a polypeptide or protein disclosed in the present invention is the product of a naturally occurring polypeptide or precursor form or proprotein. The naturally occurring polypeptide, precursor or proprotein includes, by way of nonlimiting example, the full-length gene product encoded by the corresponding gene. Alternatively, it may be defined as the polypeptide, precursor or proprotein encoded by an ORF described herein. The product “mature” form arises, by way of nonlimiting example, as a result of one or more naturally occurring processing steps that may take place within the cell (e.g., host cell) in which the gene product arises. Examples of such processing steps leading to a “mature” form of a polypeptide or protein include the cleavage of the N-terminal methionine residue encoded by the initiation codon of an ORF, or the proteolytic cleavage of a signal peptide or leader sequence. Thus a mature form arising from a precursor polypeptide or protein that has residues 1 to N, where residue 1 is the N-terminal methionine, would have residues 2 through N remaining after removal of the N-terminal methionine. Alternatively, a mature form arising from a precursor polypeptide or protein having residues 1 to N, in which an N-terminal signal sequence from residue 1 to residue M is cleaved, would have the residues from residue M+1 to residue N remaining. Further as used herein, a “mature” form of a polypeptide or protein may arise from a step of post-translational modification other than a proteolytic cleavage event. Such additional processes include, by way of non-limiting example, glycosylation, myristylation or phosphorylation. In general, a mature polypeptide or protein may result from the operation of only one of these processes, or a combination of any of them.

[0053] The term “probe”, as utilized herein, refers to nucleic acid sequences of variable length, preferably between at least about 10 nucleotides (nt), about 100 nt, or as many as approximately, e.g., 6,000 nt, depending upon the specific use. Probes are used in the detection of identical, similar, or complementary nucleic acid sequences. Longer length probes are generally obtained from a natural or recombinant source, are highly specific, and much slower to hybridize than shorter-length oligomer probes. Probes may be single-stranded or double-stranded and designed to have specificity in PCR, membrane-based hybridization technologies, or ELISA-like technologies.

[0054] The term “isolated” nucleic acid molecule, as used herein, is a nucleic acid that is separated from other nucleic acid molecules which are present in the natural source of the nucleic acid. Preferably, an “isolated” nucleic acid is free of sequences which naturally flank the nucleic acid (i.e., sequences located at the 5′- and 3′-termini of the nucleic acid) in the genomic DNA of the organism from which the nucleic acid is derived. For example, in various embodiments, the isolated NOVX nucleic acid molecules can contain less than about 5 kb, 4 kb, 3 kb, 2 kb, 1 kb, 0.5 kb or 0.1 kb of nucleotide sequences which naturally flank the nucleic acid molecule in genomic DNA of the cell/tissue from which the nucleic acid is derived (e.g., brain, heart, liver, spleen, etc.). Moreover, an “isolated” nucleic acid molecule, such as a cDNA molecule, can be substantially free of other cellular material, or culture medium, or of chemical precursors or other chemicals.

[0055] A nucleic acid molecule of the invention, e.g., a nucleic acid molecule having the nucleotide sequence of SEQ ID NO:2n-1, wherein n is an integer between 1 and 66, or a complement of this nucleotide sequence, can be isolated using standard molecular biology techniques and the sequence information provided herein. Using all or a portion of the nucleic acid sequence of SEQ ID NO:2n-1, wherein n is an integer between 1 and 66, as a hybridization probe, NOVX molecules can be isolated using standard hybridization and cloning techniques (e.g., as described in Sambrook, et al., (eds.), MOLECULAR CLONING: A LABORATORY MANUAL 2^{nd} Ed., Cold Spring Harbor Laboratory Press, Cold Spring Harbor, N.Y., 1989; and Ausubel, et al., (eds.), CURRENT PROTOCOLS IN MOLECULAR BIOLOGY, John Wiley & Sons, New York, N.Y., 1993.)

[0056] A nucleic acid of the invention can be amplified using cDNA, mRNA or alternatively, genomic DNA, as a template with appropriate oligonucleotide primers according to standard PCR amplification techniques. The nucleic acid so amplified can be cloned into an appropriate vector and characterized by DNA sequence analysis. Furthermore, oligonucleotides corresponding to NOVX nucleotide sequences can be prepared by standard synthetic techniques, e.g., using an automated DNA synthesizer.

[0057] As used herein, the term “oligonucleotide” refers to a series of linked nucleotide residues. A short oligonucleotide sequence may be based on, or designed from, a genomic or cDNA sequence and is used to amplify, confirm, or reveal the presence of an identical, similar or complementary DNA or RNA in a particular cell or tissue. Oligonucleotides comprise a nucleic acid sequence having about 10 nt, 50 nt, or 100 nt in length, preferably about 15 nt to 30 nt in length. In one embodiment of the invention, an oligonucleotide comprising a nucleic acid molecule less than 100 nt in length would further comprise at least 6 contiguous nucleotides of SEQ ID NO:2n-1, wherein n is an integer between 1 and 66, or a complement thereof. Oligonucleotides may be chemically synthesized and may also be used as probes.

[0058] In another embodiment, an isolated nucleic acid molecule of the invention comprises a nucleic acid molecule that is a complement of the nucleotide sequence shown in SEQ ID NO:2n-1, wherein n is an integer between 1 and 66, or a portion of this nucleotide sequence (e.g., a fragment that can be used as a probe or primer or a fragment encoding a biologically-active portion of a NOVX polypeptide). A nucleic acid molecule that is complementary to the nucleotide sequence of SEQ ID NO:2n-1, wherein n is an integer between 1 and 66, is one that is sufficiently complementary to the nucleotide sequence of SEQ ID NO:2n-1, wherein n is an integer between 1 and 66, that it can hydrogen bond with few or no mismatches to the nucleotide sequence shown in SEQ ID NO:2n-1, wherein n is an integer between 1 and 66, thereby forming a stable duplex.

[0059] As used herein, the term “complementary” refers to Watson-Crick or Hoogsteen base pairing between nucleotides units of a nucleic acid molecule, and the term “binding” means the physical or chemical interaction between two polypeptides or compounds or associated polypeptides or compounds or combinations thereof. Binding includes ionic, non-ionic, van der Waals, hydrophobic interactions, and the like. A physical interaction can be either direct or indirect. Indirect interactions may be through or due to the effects of another polypeptide or compound. Direct binding refers to interactions that do not take place through, or due to, the effect of another polypeptide or compound, but instead are without other substantial chemical intermediates.

[0060] A “fragment” provided herein is defined as a sequence of at least 6 (contiguous) nucleic acids or at least 4 (contiguous) amino acids, a length sufficient to allow for specific hybridization in the case of nucleic acids or for specific recognition of an epitope in the case of amino acids, and is at most some portion less than a full length sequence. Fragments may be derived from any contiguous portion of a nucleic acid or amino acid sequence of choice.

[0061] A full-length NOVX clone is identified as containing an ATG translation start codon and an in-frame stop codon. Any disclosed NOVX nucleotide sequence lacking an ATG start codon therefore encodes a truncated C-terminal fragment of the respective NOVX polypeptide, and requires that the corresponding full-length cDNA extend in the 5′ direction of the disclosed sequence. Any disclosed NOVX nucleotide sequence lacking an in-frame stop codon similarly encodes a truncated N-terminal fragment of the respective NOVX polypeptide, and requires that the corresponding full-length cDNA extend in the 3′ direction of the disclosed sequence.

[0062] A “derivative” is a nucleic acid sequence or amino acid sequence formed from the native compounds either directly, by modification or partial substitution. An “analog” is a nucleic acid sequence or amino acid sequence that has a structure similar to, but not identical to, the native compound, e.g. they differs from it in respect to certain components or side chains. Analogs may be synthetic or derived from a different evolutionary origin and may have a similar or opposite metabolic activity compared to wild type. A “homolog” is a nucleic acid sequence or amino acid sequence of a particular gene that is derived from different species.

[0063] Derivatives and analogs may be full length or other than full length. Derivatives or analogs of the nucleic acids or proteins of the invention include, but are not limited to, molecules comprising regions that are substantially homologous to the nucleic acids or proteins of the invention, in various embodiments, by at least about 70%, 80%, or 95% identity (with a preferred identity of 80-95%) over a nucleic acid or amino acid sequence of identical size or when compared to an aligned sequence in which the alignment is done by a computer homology program known in the art, or whose encoding nucleic acid is capable of hybridizing to the complement of a sequence encoding the proteins under stringent, moderately stringent, or low stringent conditions. See e.g. Ausubel, et al., CURRENT PROTOCOLS IN MOLECULAR BIOLOGY, John Wiley & Sons, New York, N.Y., 1993, and below.

[0064] A “homologous nucleic acid sequence” or “homologous amino acid sequence,” or variations thereof, refer to sequences characterized by a homology at the nucleotide level or amino acid level as discussed above. Homologous nucleotide sequences include those sequences coding for isoforms of NOVX polypeptides. Isoforms can be expressed in different tissues of the same organism as a result of, for example, alternative splicing of RNA. Alternatively, isoforms can be encoded by different genes. In the invention, homologous nucleotide sequences include nucleotide sequences encoding for a NOVX polypeptide of species other than humans, including, but not limited to: vertebrates, and thus can include, e.g., frog, mouse, rat, rabbit, dog, cat cow, horse, and other organisms. Homologous nucleotide sequences also include, but are not limited to, naturally occurring allelic variations and mutations of the nucleotide sequences set forth herein. A homologous nucleotide sequence does not, however, include the exact nucleotide sequence encoding human NOVX protein. Homologous nucleic acid sequences include those nucleic acid sequences that encode conservative amino acid substitutions (see below) in SEQ ID NO:2n-1, wherein n is an integer between 1 and 66, as well as a polypeptide possessing NOVX biological activity. Various biological activities of the NOVX proteins are described below.

[0065] A NOVX polypeptide is encoded by the open reading frame (“ORF”) of a NOVX nucleic acid. An ORF corresponds to a nucleotide sequence that could potentially be translated into a polypeptide. A stretch of nucleic acids comprising an ORF is uninterrupted by a stop codon. An ORF that represents the coding sequence for a full protein begins with an ATG “start” codon and terminates with one of the three “stop” codons, namely, TAA, TAG, or TGA. For the purposes of this invention, an ORF may be any part of a coding sequence, with or without a start codon, a stop codon, or both. For an ORF to be considered as a good candidate for coding for a bona fide cellular protein, a minimum size requirement is often set, e.g., a stretch of DNA that would encode a protein of 50 amino acids or more.

[0066] The nucleotide sequences determined from the cloning of the human NOVX genes allows for the generation of probes and primers designed for use in identifying and/or cloning NOVX homologues in other cell types, e.g. from other tissues, as well as NOVX homologues from other vertebrates. The probe/primer typically comprises substantially purified oligonucleotide. The oligonucleotide typically comprises a region of nucleotide sequence that hybridizes under stringent conditions to at least about 12, 25, 50, 100, 150, 200, 250, 300, 350 or 400 consecutive sense strand nucleotide sequence of SEQ ID NO:2n-1, wherein n is an integer between 1 and 66; or an anti-sense strand nucleotide sequence of SEQ ID NO:2n-1, wherein n is an integer between 1 and 66; or of a naturally occurring mutant of SEQ ID NO:2n-1, wherein n is an integer between 1 and 66.

[0067] Probes based on the human NOVX nucleotide sequences can be used to detect transcripts or genomic sequences encoding the same or homologous proteins. In various embodiments, the probe has a detectable label attached, e.g. the label can be a radioisotope, a fluorescent compound, an enzyme, or an enzyme co-factor. Such probes can be used as a part of a diagnostic test kit for identifying cells or tissues which mis-express a NOVX protein, such as by measuring a level of a NOVX-encoding nucleic acid in a sample of cells from a subject e.g., detecting NOVX mRNA levels or determining whether a genomic NOVX gene has been mutated or deleted.

[0068] “A polypeptide having a biologically-active portion of a NOVX polypeptide” refers to polypeptides exhibiting activity similar, but not necessarily identical to, an activity of a polypeptide of the invention, including mature forms, as measured in a particular biological assay, with or without dose dependency. A nucleic acid fragment encoding a “biologically-active portion of NOVX” can be prepared by isolating a portion of SEQ ID NO:2n-1, wherein n is an integer between 1 and 66, that encodes a polypeptide having a NOVX biological activity (the biological activities of the NOVX proteins are described below), expressing the encoded portion of NOVX protein (e.g., by recombinant expression in vitro) and assessing the activity of the encoded portion of NOVX.

[0069] NOVX Nucleic Acid and Polypeptide Variants

[0070] The invention further encompasses nucleic acid molecules that differ from the nucleotide sequences of SEQ ID NO:2n-1, wherein n is an integer between 1 and 66, due to degeneracy of the genetic code and thus encode the same NOVX proteins as that encoded by the nucleotide sequences of SEQ ID NO:2n-1, wherein n is an integer between 1 and 66. In another embodiment, an isolated nucleic acid molecule of the invention has a nucleotide sequence encoding a protein having an amino acid sequence of SEQ ID NO:2n, wherein n is an integer between 1 and 66.

[0071] In addition to the human NOVX nucleotide sequences of SEQ ID NO:2n-1, wherein n is an integer between 1 and 66, it will be appreciated by those skilled in the art that DNA sequence polymorphisms that lead to changes in the amino acid sequences of the NOVX polypeptides may exist within a population (e.g., the human population). Such genetic polymorphism in the NOVX genes may exist among individuals within a population due to natural allelic variation. As used herein, the terms “gene” and “recombinant gene” refer to nucleic acid molecules comprising an open reading frame (ORF) encoding a NOVX protein, preferably a vertebrate NOVX protein. Such natural allelic variations can typically result in 1-5% variance in the nucleotide sequence of the NOVX genes. Any and all such nucleotide variations and resulting amino acid polymorphisms in the NOVX polypeptides, which are the result of natural allelic variation and that do not alter the functional activity of the NOVX polypeptides, are intended to be within the scope of the invention.

[0072] Moreover, nucleic acid molecules encoding NOVX proteins from other species, and thus that have a nucleotide sequence that differs from a human SEQ ID NO:2n-1, wherein n is an integer between 1 and 66, are intended to be within the scope of the invention. Nucleic acid molecules corresponding to natural allelic variants and homologues of the NOVX cDNAs of the invention can be isolated based on their homology to the human NOVX nucleic acids disclosed herein using the human cDNAs, or a portion thereof, as a hybridization probe according to standard hybridization techniques under stringent hybridization conditions.

[0073] Accordingly, in another embodiment, an isolated nucleic acid molecule of the invention is at least 6 nucleotides in length and hybridizes under stringent conditions to the nucleic acid molecule comprising the nucleotide sequence of SEQ ID NO:2n-1, wherein n is an integer between 1 and 66. In another embodiment, the nucleic acid is at least 10, 25, 50, 100, 250, 500, 750, 1000, 1500, or 2000 or more nucleotides in length. In yet another embodiment, an isolated nucleic acid molecule of the invention hybridizes to the coding region. As used herein, the term “hybridizes under stringent conditions” is intended to describe conditions for hybridization and washing under which nucleotide sequences at least about 65% homologous to each other typically remain hybridized to each other.

[0074] Homologs (i.e., nucleic acids encoding NOVX proteins derived from species other than human) or other related sequences (e.g., paralogs) can be obtained by low, moderate or high stringency hybridization with all or a portion of the particular human sequence as a probe using methods well known in the art for nucleic acid hybridization and cloning.

[0075] As used herein, the phrase “stringent hybridization conditions” refers to conditions under which a probe, primer or oligonucleotide will hybridize to its target sequence, but to no other sequences. Stringent conditions are sequence-dependent and will be different in different circumstances. Longer sequences hybridize specifically at higher temperatures than shorter sequences. Generally, stringent conditions are selected to be about 5° C. lower than the thermal melting point (Tm) for the specific sequence at a defined ionic strength and pH. The Tm is the temperature (under defined ionic strength, pH and nucleic acid concentration) at which 50% of the probes complementary to the target sequence hybridize to the target sequence at equilibrium. Since the target sequences are generally present at excess, at Tm, 50% of the probes are occupied at equilibrium. Typically, stringent conditions will be those in which the salt concentration is less than about 1.0 M sodium ion, typically about 0.01 to 1.0 M sodium ion (or other salts) at pH 7.0 to 8.3 and the temperature is at least about 30° C. for short probes, primers or oligonucleotides (e.g., 10 nt to 50 nt) and at least about 60° C. for longer probes, primers and oligonucleotides. Stringent conditions may also be achieved with the addition of destabilizing agents, such as formamide.

[0076] Stringent conditions are known to those skilled in the art and can be found in Ausubel, et al., (eds.), CURRENT PROTOCOLS IN MOLECULAR BIOLOGY, John Wiley & Sons, N.Y. (1989), 6.3.1-6.3.6. Preferably, the conditions are such that sequences at least about 65%, 70%, 75%, 85%, 90%, 95%, 98%, or 99% homologous to each other typically remain hybridized to each other. A non-limiting example of stringent hybridization conditions are hybridization in a high salt buffer comprising 6×SSC, 50 mM Tris-HCl (pH 7.5), 1 mM EDTA, 0.02% PVP, 0.02% Ficoll, 0.02% BSA, and 500 mg/ml denatured salmon sperm DNA at 65° C., followed by one or more washes in 0.2×SSC, 0.01% BSA at 50° C. An isolated nucleic acid molecule of the invention that hybridizes under stringent conditions to a sequence of SEQ ID NO:2n-1, wherein n is an integer between 1 and 66, corresponds to a naturally-occurring nucleic acid molecule. As used herein, a “naturally-occurring” nucleic acid molecule refers to an RNA or DNA molecule having a nucleotide sequence that occurs, in nature (e.g., encodes a natural protein).

[0077] In a second embodiment, a nucleic acid sequence that is hybridizable to the nucleic acid molecule comprising the nucleotide sequence of SEQ ID NO:2n-1, wherein n is an integer between 1 and 66, or fragments, analogs or derivatives thereof, under conditions of moderate stringency is provided. A non-limiting example of moderate stringency hybridization conditions are hybridization in 6×SSC, 5×Reinhardt's solution, 0.5% SDS and 100 mg/ml denatured salmon sperm DNA at 55° C., followed by one or more washes in 1×SSC, 0.1% SDS at 37° C. Other conditions of moderate stringency that may be used are well-known within the art. See, e.g., Ausubel, et al. (eds.), 1993, CURRENT PROTOCOLS IN MOLECULAR BIOLOGY, John Wiley & Sons, NY, and Krieger, 1990; GENE TRANSFER AND EXPRESSION, A LABORATORY MANUAL, Stockton Press, NY.

[0078] In a third embodiment, a nucleic acid that is hybridizable to the nucleic acid molecule comprising the nucleotide sequences of SEQ ID NO:2n-1, wherein n is an integer between 1 and 66, or fragments, analogs or derivatives thereof, under conditions of low stringency, is provided. A non-limiting example of low stringency hybridization conditions are hybridization in 35% formamide, 5×SSC, 50 mM Tris-HCl (pH 7.5), 5 mM EDTA, 0.02% PVP, 0.02% Ficoll, 0.2% BSA, 100 mg/ml denatured salmon sperm DNA, 10% (wt/vol) dextran sulfate at 40° C., followed by one or more washes in 2×SSC, 25 mM Tris-HCl (pH 7.4), 5 mM EDTA, and 0.1% SDS at 50° C. Other conditions of low stringency that may be used are well known in the art (e.g., as employed for cross-species hybridizations). See, e.g., Ausubel, et al. (eds.), 1993, CURRENT PROTOCOLS IN MOLECULAR BIOLOGY, John Wiley & Sons, NY, and Kriegler, 1990, GENE TRANSFER AND EXPRESSION, A LABORATORY MANUAL, Stockton Press, NY; Shilo and Weinberg, 1981. Proc Natl Acad Sci USA 78: 6789-6792.

[0079] Conservative Mutations

[0080] In addition to naturally-occurring allelic variants of NOVX sequences that may exist in the population, the skilled artisan will further appreciate that changes can be introduced by mutation into the nucleotide sequences of SEQ ID NO:2n-1, wherein n is an integer between 1 and 66, thereby leading to changes in the amino acid sequences of the encoded NOVX protein, without altering the functional ability of that NOVX protein. For example, nucleotide substitutions leading to amino acid substitutions at “non-essential” amino acid residues can be made in the sequence of SEQ ID NO:2n, wherein n is an integer between 1 and 66. A “non-essential” amino acid residue is a residue that can be altered from the wild-type sequences of the NOVX proteins without altering their biological activity, whereas an “essential” amino acid residue is required for such biological activity. For example, amino acid residues that are conserved among the NOVX proteins of the invention are not particularly amenable to alteration. Amino acids for which conservative substitutions can be made are well-known within the art.

[0081] Another aspect of the invention pertains to nucleic acid molecules encoding NOVX proteins that contain changes in amino acid residues that are not essential for activity. Such NOVX proteins differ in amino acid sequence from SEQ ID NO:2n-1, wherein n is an integer between 1 and 66, yet retain biological activity. In one embodiment, the isolated nucleic acid molecule comprises a nucleotide sequence encoding a protein, wherein the protein comprises an amino acid sequence at least about 40% homologous to the amino acid sequences of SEQ ID NO:2n, wherein n is an integer between 1 and 66. Preferably, the protein encoded by the nucleic acid molecule is at least about 60% homologous to SEQ ID NO:2n, wherein n is an integer between 1 and 66; more preferably at least about 70% homologous to SEQ ID NO:2n, wherein n is an integer between 1 and 66; still more preferably at least about 80% homologous to SEQ ID NO:2n, wherein n is an integer between 1 and 66; even more preferably at least about 90% homologous to SEQ ID NO:2n, wherein n is an integer between 1 and 66; and most preferably at least about 95% homologous to SEQ ID NO:2n, wherein n is an integer between 1 and 66.

[0082] An isolated nucleic acid molecule encoding a NOVX protein homologous to the protein of SEQ ID NO:2n, wherein n is an integer between 1 and 66, can be created by introducing one or more nucleotide substitutions, additions or deletions into the nucleotide sequence of SEQ ID NO:2n-1, wherein n is an integer between 1 and 66, such that one or more amino acid substitutions, additions or deletions are introduced into the encoded protein.

[0083] Mutations can be introduced any one of SEQ ID NO:2n-1, wherein n is an integer between 1 and 66, by standard techniques, such as site-directed mutagenesis and PCR-mediated mutagenesis. Preferably, conservative amino acid substitutions are made at one or more non-essential amino acid residues. A “conservative amino acid substitution” is one in which the amino acid residue is replaced with an amino acid residue having a similar side chain. Families of amino acid residues having similar side chains have been defined within the art. These families include amino acids with basic side chains (e.g., lysine, arginine, histidine), acidic side chains (e.g., aspartic acid, glutamic acid), uncharged polar side chains (e.g., glycine, asparagine, glutamine, serine, threonine, tyrosine, cysteine), nonpolar side chains (e.g., alanine, valine, leucine, isoleucine, proline, phenylalanine, methionine, tryptophan), beta-branched side chains (e.g., threonine, valine, isoleucine) and aromatic side chains (e.g., tyrosine, phenylalanine, tryptophan, histidine). Thus, a non-essential amino acid residue in the NOVX protein is replaced with another amino acid residue from the same side chain family. Alternatively, in another embodiment, mutations can be introduced randomly along all or part of a NOVX coding sequence, such as by saturation mutagenesis, and the resultant mutants can be screened for NOVX biological activity to identify mutants that retain activity. Following mutagenesis of a nucleic acid of SEQ ID NO:2n-1, wherein n is an integer between 1 and 66, the encoded protein can be expressed by any recombinant technology known in the art and the activity of the protein can be determined.

[0084] The relatedness of amino acid families may also be determined based on side chain interactions. Substituted amino acids may be fully conserved “strong” residues or fully conserved “weak” residues. The “strong” group of conserved amino acid residues may be any one of the following groups: STA, NEQK, NHQK, NDEQ, QHRK, MILV, MILF, HY, FYW, wherein the single letter amino acid codes are grouped by those amino acids that may be substituted for each other. Likewise, the “weak” group of conserved residues may be any one of the following: CSA, ATV, SAG, STNK, STPA, SGND, SNDEQK, NDEQHK, NEQHRK, HFY, wherein the letters within each group represent the single letter amino acid code.

[0085] In one embodiment, a mutant NOVX protein can be assayed for (i) the ability to form protein:protein interactions with other NOVX proteins, other cell-surface proteins, or biologically-active portions thereof, (ii) complex formation between a mutant NOVX protein and a NOVX ligand; or (iii) the ability of a mutant NOVX protein to bind to an intracellular target protein or biologically-active portion thereof; (e.g. avidin proteins).

[0086] In yet another embodiment, a mutant NOVX protein can be assayed for the ability to regulate a specific biological function (e.g., regulation of insulin release).

[0087] Interfering RNA

[0088] In one aspect of the invention, NOVX gene expression can be attenuated by RNA interference. One approach well-known in the art is short interfering RNA (siRNA) mediated gene silencing where expression products of a NOVX gene are targeted by specific double stranded NOVX derived siRNA nucleotide sequences that are complementary to at least a 19-25 nt long segment of the NOVX gene transcript, including the 5′ untranslated (UT) region, the ORF, or the 3′ UT region. See, e.g., PCT applications WO00/44895, WO99/32619, WO01/75164, WO01/92513, WO01/29058, WO01/89304, WO02/16620, and WO02/29858, each incorporated by reference herein in their entirety. Targeted genes can be a NOVX gene, or an upstream or downstream modulator of the NOVX gene. Nonlimiting examples of upstream or downstream modulators of a NOVX gene include, e.g., a transcription factor that binds the NOVX gene promoter, a kinase or phosphatase that interacts with a NOVX polypeptide, and polypeptides involved in a NOVX regulatory pathway.

[0089] According to the methods of the present invention, NOVX gene expression is silenced using short interfering RNA. A NOVX polynucleotide according to the invention includes a siRNA polynucleotide. Such a NOVX siRNA can be obtained using a NOVX polynucleotide sequence, for example, by processing the NOVX ribopolynucleotide sequence in a cell-free system, such as but not limited to a Drosophila extract, or by transcription of recombinant double stranded NOVX RNA or by chemical synthesis of nucleotide sequences homologous to a NOVX sequence. See, e.g., Tuschl, Zamore, Lehmann, Bartel and Sharp (1999), Genes & Dev. 13: 3191-3197, incorporated herein by reference in its entirety. When synthesized, a typical 0.2 micromolar-scale RNA synthesis provides about 1 milligram of siRNA, which is sufficient for 1000 transfection experiments using a 24-well tissue culture plate format.

[0090] The most efficient silencing is generally observed with siRNA duplexes composed of a 21-nt sense strand and a 21-nt antisense strand, paired in a manner to have a 2-nt 3′ overhang. The sequence of the 2-nt 3′ overhang makes an additional small contribution to the specificity of siRNA target recognition. The contribution to specificity is localized to the unpaired nucleotide adjacent to the first paired bases. In one embodiment, the nucleotides in the 3′ overhang are ribonucleotides. In an alternative embodiment, the nucleotides in the 3′ overhang are deoxyribonucleotides. Using 2′-deoxyribonucleotides in the 3′ overhangs is as efficient as using ribonucleotides, but deoxyribonucleotides are often cheaper to synthesize and are most likely more nuclease resistant.

[0091] A contemplated recombinant expression vector of the invention comprises a NOVX DNA molecule cloned into an expression vector comprising operatively-linked regulatory sequences flanking the NOVX sequence in a manner that allows for expression (by transcription of the DNA molecule) of both strands. An RNA molecule that is antisense to NOVX mRNA is transcribed by a first promoter (e.g., a promoter sequence 3′ of the cloned DNA) and an RNA molecule that is the sense strand for the NOVX mRNA is transcribed by a second promoter (e.g., a promoter sequence 5′ of the cloned DNA). The sense and antisense strands may hybridize in vivo to generate siRNA constructs for silencing of the NOVX gene. Alternatively, two constructs can be utilized to create the sense and anti-sense strands of a siRNA construct. Finally, cloned DNA can encode a construct having secondary structure, wherein a single transcript has both the sense and complementary antisense sequences from the target gene or genes. In an example of this embodiment, a hairpin RNAi product is homologous to all or a portion of the target gene. In another example, a hairpin RNAi product is a siRNA. The regulatory sequences flanking the NOVX sequence may be identical or may be different, such that their expression may be modulated independently, or in a temporal or spatial manner.

[0092] In a specific embodiment, siRNAs are transcribed intracellularly by cloning the NOVX gene templates into a vector containing, e.g., a RNA pol III transcription unit from the smaller nuclear RNA (snRNA) U6 or the human RNase P RNA H1. One example of a vector system is the GeneSuppressor™ RNA Interference kit (commercially available from Imgenex). The U6 and H1 promoters are members of the type III class of Pol III promoters. The +1 nucleotide of the U6-like promoters is always guanosine, whereas the +1 for H1 promoters is adenosine. The termination signal for these promoters is defined by five consecutive thymidines. The transcript is typically cleaved after the second uridine. Cleavage at this position generates a 3′ UU overhang in the expressed siRNA, which is similar to the 3′ overhangs of synthetic siRNAs. Any sequence less than 400 nucleotides in length can be transcribed by these promoter, therefore they are ideally suited for the expression of around 21-nucleotide siRNAs in, e.g., an approximately 50-nucleotide RNA stem-loop transcript.

[0093] A siRNA vector appears to have an advantage over synthetic siRNAs where long term knock-down of expression is desired. Cells transfected with a siRNA expression vector would experience steady, long-term mRNA inhibition. In contrast, cells transfected with exogenous synthetic siRNAs typically recover from mRNA suppression within seven days or ten rounds of cell division. The long-term gene silencing ability of siRNA expression vectors may provide for applications in gene therapy.

[0094] In general, siRNAs are chopped from longer dsRNA by an ATP-dependent ribonuclease called DICER. DICER is a member of the RNase III family of double-stranded RNA-specific endonucleases. The siRNAs assemble with cellular proteins into an endonuclease complex. In vitro studies in Drosophila suggest that the siRNAs/protein complex (siRNP) is then transferred to a second enzyme complex, called an RNA-induced silencing complex (RISC), which contains an endoribonuclease that is distinct from DICER. RISC uses the sequence encoded by the antisense siRNA strand to find and destroy mRNAs of complementary sequence. The siRNA thus acts as a guide, restricting the ribonuclease to cleave only mRNAs complementary to one of the two siRNA strands.

[0095] A NOVX mRNA region to be targeted by siRNA is generally selected from a desired NOVX sequence beginning 50 to 100 nt downstream of the start codon. Alternatively, 5′ or 3′ UTRs and regions nearby the start codon can be used but are generally avoided, as these may be richer in regulatory protein binding sites. UTR-binding proteins and/or translation initiation complexes may interfere with binding of the siRNP or RISC endonuclease complex. An initial BLAST homology search for the selected siRNA sequence is done against an available nucleotide sequence library to ensure that only one gene is targeted. Specificity of target recognition by siRNA duplexes indicate that a single point mutation located in the paired region of an siRNA duplex is sufficient to abolish target mRNA degradation. See, Elbashir et al. 2001 EMBO J. 20(23):6877-88. Hence, consideration should be taken to accommodate SNPs, polymorphisms, allelic variants or species-specific variations when targeting a desired gene.

[0096] In one embodiment, a complete NOVX siRNA experiment includes the proper negative control. A negative control siRNA generally has the same nucleotide composition as the NOVX siRNA but lack significant sequence homology to the genome. Typically, one would scramble the nucleotide sequence of the NOVX siRNA and do a homology search to make sure it lacks homology to any other gene.

[0097] Two independent NOVX siRNA duplexes can be used to knock-down a target NOVX gene. This helps to control for specificity of the silencing effect. In addition, expression of two independent genes can be simultaneously knocked down by using equal concentrations of different NOVX siRNA duplexes, e.g., a NOVX siRNA and an siRNA for a regulator of a NOVX gene or polypeptide. Availability of siRNA-associating proteins is believed to be more limiting than target mRNA accessibility.

[0098] A targeted NOVX region is typically a sequence of two adenines (AA) and two thymidines (TT) divided by a spacer region of nineteen (N19) residues (e.g., AA(N19)TT). A desirable spacer region has a G/C-content of approximately 30% to 70%, and more preferably of about 50%. If the sequence AA(N19)TT is not present in the target sequence, an alternative target region would be AA(N21). The sequence of the NOVX sense siRNA corresponds to (N19)TT or N21, respectively. In the latter case, conversion of the 3′ end of the sense siRNA to TT can be performed if such a sequence does not naturally occur in the NOVX polynucleotide. The rationale for this sequence conversion is to generate a symmetric duplex with respect to the sequence composition of the sense and antisense 3′ overhangs. Symmetric 3′ overhangs may help to ensure that the siRNPs are formed with approximately equal ratios of sense and antisense target RNA-cleaving siRNPs. See, e.g., Elbashir, Lendeckel and Tuschl (2001). Genes & Dev. 15: 66-200, incorporated by reference herein in its entirely. The modification of the overhang of the sense sequence of the siRNA duplex is not expected to affect targeted mRNA recognition, as the antisense siRNA strand guides target recognition.

[0099] Alternatively, if the NOVX target mRNA does not contain a suitable AA(N21) sequence, one may search for the sequence NA(N21). Further, the sequence of the sense strand and antisense strand may still be synthesized as 5′ (N19)TT, as it is believed that the sequence of the 3′-most nucleotide of the antisense siRNA does not contribute to specificity. Unlike antisense or ribozyme technology, the secondary structure of the target mRNA does not appear to have a strong effect on silencing. See, Harborth, et al. (2001) J. Cell Science 114: 4557-4565, incorporated by reference in its entirety.

[0100] Transfection of NOVX siRNA duplexes can be achieved using standard nucleic acid transfection methods, for example, OLIGOFECTAMINE Reagent (commercially available from Invitrogen). An assay for NOVX gene silencing is generally performed approximately 2 days after transfection. No NOVX gene silencing has been observed in the absence of transfection reagent, allowing for a comparative analysis of the wild-type and silenced NOVX phenotypes. In a specific embodiment, for one well of a 24-well plate, approximately 0.84 μg of the siRNA duplex is generally sufficient. Cells are typically seeded the previous day, and are transfected at about 50% confluence. The choice of cell culture media and conditions are routine to those of skill in the art, and will vary with the choice of cell type. The efficiency of transfection may depend on the cell type, but also on the passage number and the confluency of the cells. The time and the manner of formation of siRNA-liposome complexes (e.g. inversion versus vortexing) are also critical. Low transfection efficiencies are the most frequent cause of unsuccessful NOVX silencing. The efficiency of transfection needs to be carefully examined for each new cell line to be used. Preferred cell are derived from a mammal, more preferably from a rodent such as a rat or mouse, and most preferably from a human. Where used for therapeutic treatment, the cells are preferentially autologous, although non-autologous cell sources are also contemplated as within the scope of the present invention.

[0101] For a control experiment, transfection of 0.84 μg single-stranded sense NOVX siRNA will have no effect on NOVX silencing, and 0.84 μg antisense siRNA has a weak silencing effect when compared to 0.84 μg of duplex siRNAs. Control experiments again allow for a comparative analysis of the wild-type and silenced NOVX phenotypes. To control for transfection efficiency, targeting of common proteins is typically performed, for example targeting of lamin A/C or transfection of a CMV-driven EGFP-expression plasmid (e.g. commercially available from Clontech). In the above example, a determination of the fraction of lamin A/C knockdown in cells is determined the next day by such techniques as immunofluorescence, Western blot, Northern blot or other similar assays for protein expression or gene expression. Lamin A/C monoclonal antibodies may be obtained from Santa Cruz Biotechnology.

[0102] Depending on the abundance and the half life (or turnover) of the targeted NOVX polynucleotide in a cell, a knock-down phenotype may become apparent after 1 to 3 days, or even later. In cases where no NOVX knock-down phenotype is observed, depletion of the NOVX polynucleotide may be observed by immunofluorescence or Western blotting. If the NOVX polynucleotide is still abundant after 3 days, cells need to be split and transferred to a fresh 24-well plate for re-transfection. If no knock-down of the targeted protein is observed, it may be desirable to analyze whether the target mRNA (NOVX or a NOVX upstream or downstream gene) was effectively destroyed by the transfected siRNA duplex. Two days after transfection, total RNA is prepared, reverse transcribed using a target-specific primer, and PCR-amplified with a primer pair covering at least one exon-exon junction in order to control for amplification of pre-mRNAs. RT/PCR of a non-targeted mRNA is also needed as control. Effective depletion of the mRNA yet undetectable reduction of target protein may indicate that a large reservoir of stable NOVX protein may exist in the cell. Multiple transfection in sufficiently long intervals may be necessary until the target protein is finally depleted to a point where a phenotype may become apparent. If multiple transfection steps are required, cells are split 2 to 3 days after transfection. The cells may be transfected immediately after splitting.

[0103] An inventive therapeutic method of the invention contemplates administering a NOVX siRNA construct as therapy to compensate for increased or aberrant NOVX expression or activity. The NOVX ribopolynucleotide is obtained and processed into siRNA fragments, or a NOVX siRNA is synthesized, as described above. The NOVX siRNA is administered to cells or tissues using known nucleic acid transfection techniques, as described above. A NOVX siRNA specific for a NOVX gene will decrease or knockdown NOVX transcription products, which will lead to reduced NOVX polypeptide production, resulting in reduced NOVX polypeptide activity in the cells or tissues.

[0104] The present invention also encompasses a method of treating a disease or condition associated with the presence of a NOVX protein in an individual comprising administering to the individual an RNAi construct that targets the mRNA of the protein (the mRNA that encodes the protein) for degradation. A specific RNAi construct includes a siRNA or a double stranded gene transcript that is processed into siRNAs. Upon treatment, the target protein is not produced or is not produced to the extent it would be in the absence of the treatment.

[0105] Where the NOVX gene function is not correlated with a known phenotype, a control sample of cells or tissues from healthy individuals provides a reference standard for determining NOVX expression levels. Expression levels are detected using the assays described, e.g., RT-PCR, Northern blotting, Western blotting, ELISA, and the like. A subject sample of cells or tissues is taken from a mammal, preferably a human subject, suffering from a disease state. The NOVX ribopolynucleotide is used to produce siRNA constructs, that are specific for the NOVX gene product. These cells or tissues are treated by administering NOVX siRNA's to the cells or tissues by methods described for the transfection of nucleic acids into a cell or tissue, and a change in NOVX polypeptide or polynucleotide expression is observed in the subject sample relative to the control sample, using the assays described. This NOVX gene knockdown approach provides a rapid method for determination of a NOVX minus (NOVX⁻) phenotype in the treated subject sample. The NOVX⁻ phenotype observed in the treated subject sample thus serves as a marker for monitoring the course of a disease state during treatment.

[0106] In specific embodiments, a NOVX siRNA is used in therapy. Methods for the generation and use of a NOVX siRNA are known to those skilled in the art. Example techniques are provided below.

[0107] Production of RNAs

[0108] Sense RNA (ssRNA) and antisense RNA (asRNA) of NOVX are produced using known methods such as transcription in RNA expression vectors. In the initial experiments, the sense and antisense RNA are about 500 bases in length each. The produced ssRNA and asRNA (0.5 μM) in 10 mM Tris-HCl (pH 7.5) with 20 mM NaCl were heated to 95° C. for 1 min then cooled and annealed at room temperature for 12 to 16 h. The RNAs are precipitated and resuspended in lysis buffer (below). To monitor annealing, RNAs are electrophoresed in a 2% agarose gel in TBE buffer and stained with ethidium bromide. See, e.g., Sambrook et al., Molecular Cloning. Cold Spring Harbor Laboratory Press, Plainview, N.Y. (1989).

[0109] Lysate Preparation

[0110] Untreated rabbit reticulocyte lysate (Ambion) are assembled according to the manufacturer's directions. dsRNA is incubated in the lysate at 300 C for 10 min prior to the addition of mRNAs. Then NOVX mRNAs are added and the incubation continued for an additional 60 min. The molar ratio of double stranded RNA and mRNA is about 200:1. The NOVX mRNA is radiolabeled (using known techniques) and its stability is monitored by gel electrophoresis.

[0111] In a parallel experiment made with the same conditions, the double stranded RNA is internally radiolabeled with a ³²P-ATP. Reactions are stopped by the addition of 2× proteinase K buffer and deproteinized as described previously (Tuschl et al., Genes Dev., 13:3191-3197 (1999)). Products are analyzed by electrophoresis in 15% or 18% polyacrylamide sequencing gels using appropriate RNA standards. By monitoring the gels for radioactivity, the natural production of 10 to 25 nt RNAs from the double stranded RNA can be determined.

[0112] The band of double stranded RNA, about 21-23 bps, is eluded. The efficacy of these 21-23 mers for suppressing NOVX transcription is assayed in vitro using the same rabbit reticulocyte assay described above using 50 nanomolar of double stranded 21-23 mer for each assay. The sequence of these 21-23 mers is then determined using standard nucleic acid sequencing techniques.

[0113] RNA Preparation

[0114] 21 nt RNAs, based on the sequence determined above, are chemically synthesized using Expedite RNA phosphoramidites and thymidine phosphoramidite (Proligo, Germany). Synthetic oligonucleotides are deprotected and gel-purified (Elbashir, Lendeckel, & Tuschl, Genes & Dev. 15, 188-200 (2001)), followed by Sep-Pak C18 cartridge (Waters, Milford, Mass., USA) purification (Tuschl, et al., Biochemistry, 32:11658-11668 (1993)).

[0115] These RNAs (20 μM) single strands are incubated in annealing buffer (100 mM potassium acetate, 30 mM HEPES-KOH at pH 7.4, 2 mM magnesium acetate) for 1 min at 90° C. followed by 1 h at 37° C.

[0116] Cell Culture A cell culture known in the art to regularly express NOVX is propagated using standard conditions. 24 hours before transfection, at approx. 80% confluency, the cells are trypsinized and diluted 1:5 with fresh medium without antibiotics (1-3×105 cells/ml) and transferred to 24-well plates (500 ml/well). Transfection is performed using a commercially available lipofection kit and NOVX expression is monitored using standard techniques with positive and negative control. A positive control is cells that naturally express NOVX while a negative control is cells that do not express NOVX. Base-paired 21 and 22 nt siRNAs with overhanging 3′ ends mediate efficient sequence-specific mRNA degradation in lysates and in cell culture. Different concentrations of siRNAs are used. An efficient concentration for suppression in vitro in mammalian culture is between 25 nM to 100 nM final concentration. This indicates that siRNAs are effective at concentrations that are several orders of magnitude below the concentrations applied in conventional antisense or ribozyme gene targeting experiments.

[0117] The above method provides a way both for the deduction of NOVX siRNA sequence and the use of such siRNA for in vitro suppression. In vivo suppression may be performed using the same siRNA using well known in vivo transfection or gene therapy transfection techniques.

[0118] Antisense Nucleic Acids

[0119] Another aspect of the invention pertains to isolated antisense nucleic acid molecules that are hybridizable to or complementary to the nucleic acid molecule comprising the nucleotide sequence of SEQ ID NO:2n-1, wherein n is an integer between 1 and 66, or fragments, analogs or derivatives thereof. An “antisense” nucleic acid comprises a nucleotide sequence that is complementary to a “sense” nucleic acid encoding a protein (e.g., complementary to the coding strand of a double-stranded cDNA molecule or complementary to an mRNA sequence). In specific aspects, antisense nucleic acid molecules are provided that comprise a sequence complementary to at least about 10, 25, 50, 100, 250 or 500 nucleotides or an entire NOVX coding strand, or to only a portion thereof. Nucleic acid molecules encoding fragments, homologs, derivatives and analogs of a NOVX protein of SEQ ID NO:2n, wherein n is an integer between 1 and 66, or antisense nucleic acids complementary to a NOVX nucleic acid sequence of SEQ ID NO:2n-1, wherein n is an integer between 1 and 66, are additionally provided.

[0120] In one embodiment, an antisense nucleic acid molecule is antisense to a “coding region” of the coding strand of a nucleotide sequence encoding a NOVX protein. The term “coding region” refers to the region of the nucleotide sequence comprising codons which are translated into amino acid residues. In another embodiment, the antisense nucleic acid molecule is antisense to a “noncoding region” of the coding strand of a nucleotide sequence encoding the NOVX protein. The term “noncoding region” refers to 5′ and 3′ sequences which flank the coding region that are not translated into amino acids (i.e., also referred to as 5′ and 3′ untranslated regions).

[0121] Given the coding strand sequences encoding the NOVX protein disclosed herein, antisense nucleic acids of the invention can be designed according to the rules of Watson and Crick or Hoogsteen base pairing. The antisense nucleic acid molecule can be complementary to the entire coding region of NOVX mRNA, but more preferably is an oligonucleotide that is antisense to only a portion of the coding or noncoding region of NOVX mRNA. For example, the antisense oligonucleotide can be complementary to the region surrounding the translation start site of NOVX mRNA. An antisense oligonucleotide can be, for example, about 5, 10, 15, 20, 25, 30, 35, 40, 45 or 50 nucleotides in length. An antisense nucleic acid of the invention can be constructed using chemical synthesis or enzymatic ligation reactions using procedures known in the art. For example, an antisense nucleic acid (e.g., an antisense oligonucleotide) can be chemically synthesized using naturally-occurring nucleotides or variously modified nucleotides designed to increase the biological stability of the molecules or to increase the physical stability of the duplex formed between the antisense and sense nucleic acids (e.g., phosphorothioate derivatives and acridine substituted nucleotides can be used).

[0122] Examples of modified nucleotides that can be used to generate the antisense nucleic acid include: 5-fluorouracil, 5-bromouracil, 5-chlorouracil, 5-iodouracil, hypoxanthine, xanthine, 4-acetylcytosine, 5-carboxymethylaminomethyl-2-thiouridine, 5-(carboxyhydroxylmethyl) uracil, 5-carboxymethylaminomethyluracil, dihydrouracil, beta-D-galactosylqueosine, inosine, N6-isopentenyladenine, 1-methylguanine, 1-methylinosine, 2,2-dimethylguanine, 2-methyladenine, 2-methylguanine, 5-methoxyuracil, 3-methylcytosine, 5-methylcytosine, N6-adenine, 7-methylguanine, 5-methylaminomethyluracil, 5-methoxyaminomethyl-2-thiouracil, 2-thiouracil, 4-thiouracil, beta-D-mannosylqueosine, 5′-methoxycarboxymethyluracil, 2-methylthio-N6-isopentenyladenine, uracil-5-oxyacetic acid (v), wybutoxosine, pseudouracil, queosine, 2-thiocytosine, 5-methyl-2-thiouracil, 5-methyluracil, uracil-5-oxyacetic acid methylester, uracil-5-oxyacetic acid (v), 5-methyl-2-thiouracil, 3-(3-amino-3-N-2-carboxypropyl) uracil, (acp3)w, and 2,6-diaminopurine. Alternatively, the antisense nucleic acid can be produced biologically using an expression vector into which a nucleic acid has been subcloned in an antisense orientation (i.e., RNA transcribed from the inserted nucleic acid will be of an antisense orientation to a target nucleic acid of interest, described further in the following subsection).

[0123] The antisense nucleic acid molecules of the invention are typically administered to a subject or generated in situ such that they hybridize with or bind to cellular mRNA and/or genomic DNA encoding a NOVX protein to thereby inhibit expression of the protein (e.g., by inhibiting transcription and/or translation). The hybridization can be by conventional nucleotide complementarity to form a stable duplex, or, for example, in the case of an antisense nucleic acid molecule that binds to DNA duplexes, through specific interactions in the major groove of the double helix. An example of a route of administration of antisense nucleic acid molecules of the invention includes direct injection at a tissue site. Alternatively, antisense nucleic acid molecules can be modified to target selected cells and then administered systemically. For example, for systemic administration, antisense molecules can be modified such that they specifically bind to receptors or antigens expressed on a selected cell surface (e.g., by linking the antisense nucleic acid molecules to peptides or antibodies that bind to cell surface receptors or antigens). The antisense nucleic acid molecules can also be delivered to cells using the vectors described herein. To achieve sufficient nucleic acid molecules, vector constructs in which the antisense nucleic acid molecule is placed under the control of a strong pol II or pol III promoter are preferred.

[0124] In yet another embodiment, the antisense nucleic acid molecule of the invention is an α-anomeric nucleic acid molecule. An α-anomeric nucleic acid molecule forms specific double-stranded hybrids with complementary RNA in which, contrary to the usual β-units, the strands run parallel to each other. See, e.g., Gaultier, et al., 1987. Nucl. Acids Res. 15: 6625-6641. The antisense nucleic acid molecule can also comprise a 2′-o-methylribonucleotide (See, e.g., Inoue, et al. 1987. Nucl. Acids Res. 15: 6131-6148) or a chimeric RNA-DNA analogue (See, e.g., Inoue, et al., 1987. FEBS Lett. 215: 327-330.

[0125] Ribozymes and PNA Moieties

[0126] Nucleic acid modifications include, by way of non-limiting example, modified bases, and nucleic acids whose sugar phosphate backbones are modified or derivatized. These modifications are carried out at least in part to enhance the chemical stability of the modified nucleic acid, such that they may be used, for example, as antisense binding nucleic acids in therapeutic applications in a subject.

[0127] In one embodiment, an antisense nucleic acid of the invention is a ribozyme. Ribozymes are catalytic RNA molecules with ribonuclease activity that are capable of cleaving a single-stranded nucleic acid, such as an mRNA, to which they have a complementary region. Thus, ribozymes (e.g., hammerhead ribozymes as described in Haselhoff and Gerlach 1988. Nature 334: 585-591) can be used to catalytically cleave NOVX mRNA transcripts to thereby inhibit translation of NOVX mRNA. A ribozyme having specificity for a NOVX-encoding nucleic acid can be designed based upon the nucleotide sequence of a NOVX cDNA disclosed herein (i.e., SEQ ID NO:2n-1, wherein n is an integer between 1 and 66). For example, a derivative of a Tetrahymena L-19 IVS RNA can be constructed in which the nucleotide sequence of the active site is complementary to the nucleotide sequence to be cleaved in a NOVX-encoding mRNA. See, e.g., U.S. Pat. No. 4,987,071 to Cech, et al. and U.S. Pat. No. 5,116,742 to Cech, et al. NOVX mRNA can also be used to select a catalytic RNA having a specific ribonuclease activity from a pool of RNA molecules. See, e.g., Bartel et al., (1993) Science 261:1411-1418.

[0128] Alternatively, NOVX gene expression can be inhibited by targeting nucleotide sequences complementary to the regulatory region of the NOVX nucleic acid (e.g., the NOVX promoter and/or enhancers) to form triple helical structures that prevent transcription of the NOVX gene in target cells. See, e.g., Helene, 1991. Anticancer Drug Des. 6: 569-84; Helene, et al. 1992. Ann. N.Y. Acad. Sci. 660: 27-36; Maher, 1992. Bioassays 14: 807-15.

[0129] In various embodiments, the NOVX nucleic acids can be modified at the base moiety, sugar moiety or phosphate backbone to improve, e.g., the stability, hybridization, or solubility of the molecule. For example, the deoxyribose phosphate backbone of the nucleic acids can be modified to generate peptide nucleic acids. See, e.g., Hyrup, et al., 1996. Bioorg Med Chem 4: 5-23. As used herein, the terms “peptide nucleic acids” or “PNAs” refer to nucleic acid mimics (e.g., DNA mimics) in which the deoxyribose phosphate backbone is replaced by a pseudopeptide backbone and only the four natural nucleotide bases are retained. The neutral backbone of PNAs has been shown to allow for specific hybridization to DNA and RNA under conditions of low ionic strength. The synthesis of PNA oligomer can be performed using standard solid phase peptide synthesis protocols as described in Hyrup, et al., 1996. supra; Perry-O'Keefe, et al., 1996. Proc. Natl. Acad. Sci. USA 93: 14670-14675.

[0130] PNAs of NOVX can be used in therapeutic and diagnostic applications. For example, PNAs can be used as antisense or antigene agents for sequence-specific modulation of gene expression by, e.g., inducing transcription or translation arrest or inhibiting replication. PNAs of NOVX can also be used, for example, in the analysis of single base pair mutations in a gene (e.g., PNA directed PCR clamping; as artificial restriction enzymes when used in combination with other enzymes, e.g., S₁ nucleases (See, Hyrup, et al., 1996.supra); or as probes or primers for DNA sequence and hybridization (See, Hyrup, et al., 1996, supra; Perry-O'Keefe, et al., 1996. supra).

[0131] In another embodiment, PNAs of NOVX can be modified, e.g., to enhance their stability or cellular uptake, by attaching lipophilic or other helper groups to PNA, by the formation of PNA-DNA chimeras, or by the use of liposomes or other techniques of drug delivery known in the art. For example, PNA-DNA chimeras of NOVX can be generated that may combine the advantageous properties of PNA and DNA. Such chimeras allow DNA recognition enzymes (e.g., RNase H and DNA polymerases) to interact with the DNA portion while the PNA portion would provide high binding affinity and specificity. PNA-DNA chimeras can be linked using linkers of appropriate lengths selected in terms of base stacking, number of bonds between the nucleotide bases, and orientation (see, Hyrup, et al., 1996. supra). The synthesis of PNA-DNA chimeras can be performed as described in Hyrup, et al., 1996. supra and Finn, et al., 1996. Nucl Acids Res 24: 3357-3363. For example, a DNA chain can be synthesized on a solid support using standard phosphoramidite coupling chemistry, and modified nucleoside analogs, e.g., 5′-(4-methoxytrityl)amino-5′-deoxy-thymidine phosphoramidite, can be used between the PNA and the 5′ end of DNA. See, e.g., Mag, et al., 1989. Nucl Acid Res 17: 5973-5988. PNA monomers are then coupled in a stepwise manner to produce a chimeric molecule with a 5′ PNA segment and a 3′ DNA segment. See, e.g., Finn, et al., 1996. supra. Alternatively, chimeric molecules can be synthesized with a 5′ DNA segment and a 3′ PNA segment. See, e.g., Petersen, et al., 1975. Bioorg. Med. Chem. Lett. 5: 1119-11124.

[0132] In other embodiments, the oligonucleotide may include other appended groups such as peptides (e.g., for targeting host cell receptors in vivo), or agents facilitating transport across the cell membrane (see, e.g., Letsinger, et al., 1989. Proc. Natl. Acad. Sci. U.S.A. 86: 6553-6556; Lemaitre, et al., 1987. Proc. Natl. Acad. Sci. 84: 648-652; PCT Publication No. WO88/09810) or the blood-brain barrier (see, e.g., PCT Publication No. WO 89/10134). In addition, oligonucleotides can be modified with hybridization triggered cleavage agents (see, e.g., Krol, et al., 1988. BioTechniques 6:958-976) or intercalating agents (see, e.g., Zon, 1988. Pharm. Res. 5: 539-549). To this end, the oligonucleotide may be conjugated to another molecule, e.g., a peptide, a hybridization triggered cross-linking agent, a transport agent, a hybridization-triggered cleavage agent, and the like.

[0133] NOVX Polypeptides

[0134] A polypeptide according to the invention includes a polypeptide including the amino acid sequence of NOVX polypeptides whose sequences are provided in any one of SEQ ID NO:2n, wherein n is an integer between 1 and 66. The invention also includes a mutant or variant protein any of whose residues may be changed from the corresponding residues shown in any one of SEQ ID NO:2n, wherein n is an integer between 1 and 66, while still encoding a protein that maintains its NOVX activities and physiological functions, or a functional fragment thereof.

[0135] In general, a NOVX variant that preserves NOVX-like function includes any variant in which residues at a particular position in the sequence have been substituted by other amino acids, and further include the possibility of inserting an additional residue or residues between two residues of the parent protein as well as the possibility of deleting one or more residues from the parent sequence. Any amino acid substitution, insertion, or deletion is encompassed by the invention. In favorable circumstances, the substitution is a conservative substitution as defined above.

[0136] One aspect of the invention pertains to isolated NOVX proteins, and biologically-active portions thereof, or derivatives, fragments, analogs or homologs thereof. Also provided are polypeptide fragments suitable for use as immunogens to raise anti-NOVX antibodies. In one embodiment, native NOVX proteins can be isolated from cells or tissue sources by an appropriate purification scheme using standard protein purification techniques. In another embodiment, NOVX proteins are produced by recombinant DNA techniques. Alternative to recombinant expression, a NOVX protein or polypeptide can be synthesized chemically using standard peptide synthesis techniques.

[0137] An “isolated” or “purified” polypeptide or protein or biologically-active portion thereof is substantially free of cellular material or other contaminating proteins from the cell or tissue source from which the NOVX protein is derived, or substantially free from chemical precursors or other chemicals when chemically synthesized. The language “substantially free of cellular material” includes preparations of NOVX proteins in which the protein is separated from cellular components of the cells from which it is isolated or recombinantly-produced. In one embodiment, the language “substantially free of cellular material” includes preparations of NOVX proteins having less than about 30% (by dry weight) of non-NOVX proteins (also referred to herein as a “contaminating protein”), more preferably less than about 20% of non-NOVX proteins, still more preferably less than about 10% of non-NOVX proteins, and most preferably less than about 5% of non-NOVX proteins. When the NOVX protein or biologically-active portion thereof is recombinantly-produced, it is also preferably substantially free of culture medium, i.e., culture medium represents less than about 20%, more preferably less than about 10%, and most preferably less than about 5% of the volume of the NOVX protein preparation.

[0138] The language “substantially free of chemical precursors or other chemicals” includes preparations of NOVX proteins in which the protein is separated from chemical precursors or other chemicals that are involved in the synthesis of the protein. In one embodiment, the language “substantially free of chemical precursors or other chemicals” includes preparations of NOVX proteins having less than about 30% (by dry weight) of chemical precursors or non-NOVX chemicals, more preferably less than about 20% chemical precursors or non-NOVX chemicals, still more preferably less than about 10% chemical precursors or non-NOVX chemicals, and most preferably less than about 5% chemical precursors or non-NOVX chemicals.

[0139] Biologically-active portions of NOVX proteins include peptides comprising amino acid sequences sufficiently homologous to or derived from the amino acid sequences of the NOVX proteins (e.g., the amino acid sequence of SEQ ID NO:2n, wherein n is an integer between 1 and 66) that include fewer amino acids than the full-length NOVX proteins, and exhibit at least one activity of a NOVX protein. Typically, biologically-active portions comprise a domain or motif with at least one activity of the NOVX protein. A biologically-active portion of a NOVX protein can be a polypeptide which is, for example, 10, 25, 50, 100 or more amino acid residues in length.

[0140] Moreover, other biologically-active portions, in which other regions of the protein are deleted, can be prepared by recombinant techniques and evaluated for one or more of the functional activities of a native NOVX protein.

[0141] In an embodiment, the NOVX protein has an amino acid sequence of SEQ ID NO:2n, wherein n is an integer between 1 and 66. In other embodiments, the NOVX protein is substantially homologous to SEQ ID NO:2n, wherein n is an integer between 1 and 66, and retains the functional activity of the protein of SEQ ID NO:2n, wherein n is an integer between 1 and 66, yet differs in amino acid sequence due to natural allelic variation or mutagenesis, as described in detail, below. Accordingly, in another embodiment, the NOVX protein is a protein that comprises an amino acid sequence at least about 45% homologous to the amino acid sequence of SEQ ID NO:2n, wherein n is an integer between 1 and 66, and retains the functional activity of the NOVX proteins of SEQ ID NO:2n, wherein n is an integer between 1 and 66.

[0142] Determining Homology Between Two or More Sequences

[0143] To determine the percent homology of two amino acid sequences or of two nucleic acids, the sequences are aligned for optimal comparison purposes (e.g., gaps can be introduced in the sequence of a first amino acid or nucleic acid sequence for optimal alignment with a second amino or nucleic acid sequence). The amino acid residues or nucleotides at corresponding amino acid positions or nucleotide positions are then compared. When a position in the first sequence is occupied by the same amino acid residue or nucleotide as the corresponding position in the second sequence, then the molecules are homologous at that position (i.e., as used herein amino acid or nucleic acid “homology” is equivalent to amino acid or nucleic acid “identity”).

[0144] The nucleic acid sequence homology may be determined as the degree of identity between two sequences. The homology may be determined using computer programs known in the art, such as GAP software provided in the GCG program package. See, Needleman and Wunsch, 1970. J Mol Biol 48: 443-453. Using GCG GAP software with the following settings for nucleic acid sequence comparison: GAP creation penalty of 5.0 and GAP extension penalty of 0.3, the coding region of the analogous nucleic acid sequences referred to above exhibits a degree of identity preferably of at least 70%, 75%, 80%, 85%, 90%, 95%, 98%, or 99%, with the CDS (encoding) part of the DNA sequence of SEQ ID NO:2n-1, wherein n is an integer between 1 and 66.

[0145] The term “sequence identity” refers to the degree to which two polynucleotide or polypeptide sequences are identical on a residue-by-residue basis over a particular region of comparison. The term “percentage of sequence identity” is calculated by comparing two optimally aligned sequences over that region of comparison, determining the number of positions at which the identical nucleic acid base (e.g., A, T, C, G, U, or I, in the case of nucleic acids) occurs in both sequences to yield the number of matched positions, dividing the number of matched positions by the total number of positions in the region of comparison (i.e., the window size), and multiplying the result by 100 to yield the percentage of sequence identity. The term “substantial identity” as used herein denotes a characteristic of a polynucleotide sequence, wherein the polynucleotide comprises a sequence that has at least 80 percent sequence identity, preferably at least 85 percent identity and often 90 to 95 percent sequence identity, more usually at least 99 percent sequence identity as compared to a reference sequence over a comparison region.

[0146] Chimeric and Fusion Proteins The invention also provides NOVX chimeric or fusion proteins. As used herein, a NOVX “chimeric protein” or “fusion protein” comprises a NOVX polypeptide operatively-linked to a non-NOVX polypeptide. An “NOVX polypeptide” refers to a polypeptide having an amino acid sequence corresponding to a NOVX protein of SEQ ID NO:2n, wherein n is an integer between 1 and 66, whereas a “non-NOVX polypeptide” refers to a polypeptide having an amino acid sequence corresponding to a protein that is not substantially homologous to the NOVX protein, e.g., a protein that is different from the NOVX protein and that is derived from the same or a different organism. Within a NOVX fusion protein the NOVX polypeptide can correspond to all or a portion of a NOVX protein. In one embodiment, a NOVX fusion protein comprises at least one biologically-active portion of a NOVX protein. In another embodiment, a NOVX fusion protein comprises at least two biologically-active portions of a NOVX protein. In yet another embodiment, a NOVX fusion protein comprises at least three biologically-active portions of a NOVX protein. Within the fusion protein, the term “operatively-linked” is intended to indicate that the NOVX polypeptide and the non-NOVX polypeptide are fused in-frame with one another. The non-NOVX polypeptide can be fused to the N-terminus or C-terminus of the NOVX polypeptide.

[0147] In one embodiment, the fusion protein is a GST-NOVX fusion protein in which the NOVX sequences are fused to the C-terminus of the GST (glutathione S-transferase) sequences. Such fusion proteins can facilitate the purification of recombinant NOVX polypeptides.

[0148] In another embodiment, the fusion protein is a NOVX protein containing a heterologous signal sequence at its N-terminus. In certain host cells (e.g., mammalian host cells), expression and/or secretion of NOVX can be increased through use of a heterologous signal sequence.

[0149] In yet another embodiment, the fusion protein is a NOVX-immunoglobulin fusion protein in which the NOVX sequences are fused to sequences derived from a member of the immunoglobulin protein family. The NOVX-immunoglobulin fusion proteins of the invention can be incorporated into pharmaceutical compositions and administered to a subject to inhibit an interaction between a NOVX ligand and a NOVX protein on the surface of a cell, to thereby suppress NOVX-mediated signal transduction in vivo. The NOVX-immunoglobulin fusion proteins can be used to affect the bioavailability of a NOVX cognate ligand. Inhibition of the NOVX ligand/NOVX interaction may be useful therapeutically for both the treatment of proliferative and differentiative disorders, as well as modulating (e.g. promoting or inhibiting) cell survival. Moreover, the NOVX-immunoglobulin fusion proteins of the invention can be used as immunogens to produce anti-NOVX antibodies in a subject, to purify NOVX ligands, and in screening assays to identify molecules that inhibit the interaction of NOVX with a NOVX ligand.

[0150] A NOVX chimeric or fusion protein of the invention can be produced by standard recombinant DNA techniques. For example, DNA fragments coding for the different polypeptide sequences are ligated together in-frame in accordance with conventional techniques, e.g., by employing blunt-ended or stagger-ended termini for ligation, restriction enzyme digestion to provide for appropriate termini, filling-in of cohesive ends as appropriate, alkaline phosphatase treatment to avoid undesirable joining, and enzymatic ligation. In another embodiment, the fusion gene can be synthesized by conventional techniques including automated DNA synthesizers. Alternatively, PCR amplification of gene fragments can be carried out using anchor primers that give rise to complementary overhangs between two consecutive gene fragments that can subsequently be annealed and reamplified to generate a chimeric gene sequence (see, e.g., Ausubel, et al. (eds.) CURRENT PROTOCOLS IN MOLECULAR BIOLOGY, John Wiley & Sons, 1992). Moreover, many expression vectors are commercially available that already encode a fusion moiety (e.g., a GST polypeptide). A NOVX-encoding nucleic acid can be cloned into such an expression vector such that the fusion moiety is linked in-frame to the NOVX protein.

[0151] NOVX Agonists and Antagonists

[0152] The invention also pertains to variants of the NOVX proteins that function as either NOVX agonists (i.e., mimetics) or as NOVX antagonists. Variants of the NOVX protein can be generated by mutagenesis (e.g., discrete point mutation or truncation of the NOVX protein). An agonist of the NOVX protein can retain substantially the same, or a subset of, the biological activities of the naturally occurring form of the NOVX protein. An antagonist of the NOVX protein can inhibit one or more of the activities of the naturally occurring form of the NOVX protein by, for example, competitively binding to a downstream or upstream member of a cellular signaling cascade which includes the NOVX protein. Thus, specific biological effects can be elicited by treatment with a variant of limited function. In one embodiment, treatment of a subject with a variant having a subset of the biological activities of the naturally occurring form of the protein has fewer side effects in a subject relative to treatment with the naturally occurring form of the NOVX proteins.

[0153] Variants of the NOVX proteins that function as either NOVX agonists (i.e., mimetics) or as NOVX antagonists can be identified by screening combinatorial libraries of mutants (e.g., truncation mutants) of the NOVX proteins for NOVX protein agonist or antagonist activity. In one embodiment, a variegated library of NOVX variants is generated by combinatorial mutagenesis at the nucleic acid level and is encoded by a variegated gene library. A variegated library of NOVX variants can be produced by, for example, enzymatically ligating a mixture of synthetic oligonucleotides into gene sequences such that a degenerate set of potential NOVX sequences is expressible as individual polypeptides, or alternatively, as a set of larger fusion proteins (e.g., for phage display) containing the set of NOVX sequences therein. There are a variety of methods which can be used to produce libraries of potential NOVX variants from a degenerate oligonucleotide sequence. Chemical synthesis of a degenerate gene sequence can be performed in an automatic DNA synthesizer, and the synthetic gene then ligated into an appropriate expression vector. Use of a degenerate set of genes allows for the provision, in one mixture, of all of the sequences encoding the desired set of potential NOVX sequences. Methods for synthesizing degenerate oligonucleotides are well-known within the art. See, e.g., Narang, 1983. Tetrahedron 39: 3; Itakura, et al., 1984. Annu. Rev. Biochem. 53: 323; Itakura, et al., 1984. Science 198: 1056; Ike, et al., 1983. Nucl. Acids Res. 11: 477.

[0154] Polypeptide Libraries

[0155] In addition, libraries of fragments of the NOVX protein coding sequences can be used to generate a variegated population of NOVX fragments for screening and subsequent selection of variants of a NOVX protein. In one embodiment, a library of coding sequence fragments can be generated by treating a double stranded PCR fragment of a NOVX coding sequence with a nuclease under conditions wherein nicking occurs only about once per molecule, denaturing the double stranded DNA, renaturing the DNA to form double-stranded DNA that can include sense/antisense pairs from different nicked products, removing single stranded portions from reformed duplexes by treatment with S₁ nuclease, and ligating the resulting fragment library into an expression vector. By this method, expression libraries can be derived which encodes N-terminal and internal fragments of various sizes of the NOVX proteins.

[0156] Various techniques are known in the art for screening gene products of combinatorial libraries made by point mutations or truncation, and for screening cDNA libraries for gene products having a selected property. Such techniques are adaptable for rapid screening of the gene libraries generated by the combinatorial mutagenesis of NOVX proteins. The most widely used techniques, which are amenable to high throughput analysis, for screening large gene libraries typically include cloning the gene library into replicable expression vectors, transforming appropriate cells with the resulting library of vectors, and expressing the combinatorial genes under conditions in which detection of a desired activity facilitates isolation of the vector encoding the gene whose product was detected. Recursive ensemble mutagenesis (REM), a new technique that enhances the frequency of functional mutants in the libraries, can be used in combination with the screening assays to identify NOVX variants. See, e.g., Arkin and Yourvan, 1992. Proc. Natl. Acad. Sci. USA 89: 7811-7815; Delgrave, et al., 1993. Protein Engineering 6:327-331.

[0157] Anti-NOVX Antibodies

[0158] Included in the invention are antibodies to NOVX proteins, or fragments of NOVX proteins. The term “antibody” as used herein refers to immunoglobulin molecules and immunologically active portions of immunoglobulin (Ig) molecules, i.e., molecules that contain an antigen binding site that specifically binds (immunoreacts with) an antigen. Such antibodies include, but are not limited to, polyclonal, monoclonal, chimeric, single chain, F_{ab}, F_{ab′}, and F_{(ab′)2} fragments, and an F_{ab} expression library. In general, antibody molecules obtained from humans relates to any of the classes IgG, IgM, IgA, IgE and IgD, which differ from one another by the nature of the heavy chain present in the molecule. Certain classes have subclasses as well, such as IgG₁, IgG₂, and others. Furthermore, in humans, the light chain may be a kappa chain or a lambda chain. Reference herein to antibodies includes a reference to all such classes, subclasses and types of human antibody species.

[0159] An isolated protein of the invention intended to serve as an antigen, or a portion or fragment thereof, can be used as an immunogen to generate antibodies that immunospecifically bind the antigen, using standard techniques for polyclonal and monoclonal antibody preparation. The full-length protein can be used or, alternatively, the invention provides antigenic peptide fragments of the antigen for use as immunogens. An antigenic peptide fragment comprises at least 6 amino acid residues of the amino acid sequence of the full length protein, such as an amino acid sequence of SEQ ID NO:2n, wherein n is an integer between 1 and 66, and encompasses an epitope thereof such that an antibody raised against the peptide forms a specific immune complex with the full length protein or with any fragment that contains the epitope. Preferably, the antigenic peptide comprises at least 10 amino acid residues, or at least 15 amino acid residues, or at least 20 amino acid residues, or at least 30 amino acid residues. Preferred epitopes encompassed by the antigenic peptide are regions of the protein that are located on its surface; commonly these are hydrophilic regions. In certain embodiments of the invention, at least one epitope encompassed by the antigenic peptide is a region of NOVX that is located on the surface of the protein, e.g., a hydrophilic region. A hydrophobicity analysis of the human NOVX protein sequence will indicate which regions of a NOVX polypeptide are particularly hydrophilic and, therefore, are likely to encode surface residues useful for targeting antibody production. As a means for targeting antibody production, hydropathy plots showing regions of hydrophilicity and hydrophobicity may be generated by any method well known in the art, including, for example, the Kyte Doolittle or the Hopp Woods methods, either with or without Fourier transformation. See, e.g., Hopp and Woods, 1981, Proc. Nat. Acad. Sci. USA 78: 3824-3828; Kyte and Doolittle 1982, J. Mol. Biol. 157: 105-142, each incorporated herein by reference in their entirety. Antibodies that are specific for one or more domains within an antigenic protein, or derivatives, fragments, analogs or homologs thereof, are also provided herein.

[0160] The term “epitope” includes any protein determinant capable of specific binding to an immunoglobulin or T-cell receptor. Epitopic determinants usually consist of chemically active surface groupings of molecules such as amino acids or sugar side chains and usually have specific three dimensional structural characteristics, as well as specific charge characteristics. A NOVX polypeptide or a fragment thereof comprises at least one antigenic epitope. An anti-NOVX antibody of the present invention is said to specifically bind to antigen NOVX when the equilibrium binding constant (K_{D}) is ≦1 μM, preferably ≦100 nM, more preferably ≦10 nM, and most preferably ≦100 pM to about 1 pM, as measured by assays such as radioligand binding assays or similar assays known to those skilled in the art.

[0161] A protein of the invention, or a derivative, fragment, analog, homolog or ortholog thereof, may be utilized as an immunogen in the generation of antibodies that immunospecifically bind these protein components.

[0162] Various procedures known within the art may be used for the production of polyclonal or monoclonal antibodies directed against a protein of the invention, or against derivatives, fragments, analogs homologs or orthologs thereof (see, for example, Antibodies: A Laboratory Manual, Harlow E, and Lane D, 1988, Cold Spring Harbor Laboratory Press, Cold Spring Harbor, N.Y., incorporated herein by reference). Some of these antibodies are discussed below.

[0163] Polyclonal Antibodies

[0164] For the production of polyclonal antibodies, various suitable host animals (e.g., rabbit, goat, mouse or other mammal) may be immunized by one or more injections with the native protein, a synthetic variant thereof, or a derivative of the foregoing. An appropriate immunogenic preparation can contain, for example, the naturally occurring immunogenic protein, a chemically synthesized polypeptide representing the immunogenic protein, or a recombinantly expressed immunogenic protein. Furthermore, the protein may be conjugated to a second protein known to be immunogenic in the mammal being immunized. Examples of such immunogenic proteins include but are not limited to keyhole limpet hemocyanin, serum albumin, bovine thyroglobulin, and soybean trypsin inhibitor. The preparation can further include an adjuvant. Various adjuvants used to increase the immunological response include, but are not limited to, Freund's (complete and incomplete), mineral gels (e.g., aluminum hydroxide), surface active substances (e.g., lysolecithin, pluronic polyols, polyanions, peptides, oil emulsions, dinitrophenol, etc.), adjuvants usable in humans such as Bacille Calmette-Guerin and Corynebacterium parvum, or similar immunostimulatory agents. Additional examples of adjuvants which can be employed include MPL-TDM adjuvant (monophosphoryl Lipid A, synthetic trehalose dicorynomycolate).

[0165] The polyclonal antibody molecules directed against the immunogenic protein can be isolated from the mammal (e.g., from the blood) and further purified by well known techniques, such as affinity chromatography using protein A or protein G, which provide primarily the IgG fraction of immune serum. Subsequently, or alternatively, the specific antigen which is the target of the immunoglobulin sought, or an epitope thereof, may be immobilized on a column to purify the immune specific antibody by immunoaffinity chromatography. Purification of immunoglobulins is discussed, for example, by D. Wilkinson (The Scientist, published by The Scientist, Inc., Philadelphia Pa., Vol. 14, No. 8 (Apr. 17, 2000), pp. 25-28).

[0166] Monoclonal Antibodies

[0167] The term “monoclonal antibody” (MAb) or “monoclonal antibody composition”, as used herein, refers to a population of antibody molecules that contain only one molecular species of antibody molecule consisting of a unique light chain gene product and a unique heavy chain gene product. In particular, the complementarity determining regions (CDRs) of the monoclonal antibody are identical in all the molecules of the population. MAbs thus contain an antigen binding site capable of immunoreacting with a particular epitope of the antigen characterized by a unique binding affinity for it.

[0168] Monoclonal antibodies can be prepared using hybridoma methods, such as those described by Kohler and Milstein, Nature, 256:495 (1975). In a hybridoma method, a mouse, hamster, or other appropriate host animal, is typically immunized with an immunizing agent to elicit lymphocytes that produce or are capable of producing antibodies that will specifically bind to the immunizing agent. Alternatively, the lymphocytes can be immunized in vitro.

[0169] The immunizing agent will typically include the protein antigen, a fragment thereof or a fusion protein thereof. Generally, either peripheral blood lymphocytes are used if cells of human origin are desired, or spleen cells or lymph node cells are used if non-human mammalian sources are desired. The lymphocytes are then fused with an immortalized cell line using a suitable fusing agent, such as polyethylene glycol, to form a hybridoma cell (Goding, MONOCLONAL ANTLBODIES: PRINCIPLES AND PRACTICE, Academic Press, (1986) pp. 59-103). Immortalized cell lines are usually transformed mammalian cells, particularly myeloma cells of rodent, bovine and human origin. Usually, rat or mouse myeloma cell lines are employed. The hybridoma cells can be cultured in a suitable culture medium that preferably contains one or more substances that inhibit the growth or survival of the unfused, immortalized cells. For example, if the parental cells lack the enzyme hypoxanthine guanine phosphoribosyl transferase (HGPRT or HPRT), the culture medium for the hybridomas typically will include hypoxanthine, aminopterin, and thymidine (“HAT medium”), which substances prevent the growth of HGPRT-deficient cells.

[0170] Preferred immortalized cell lines are those that fuse efficiently, support stable high level expression of antibody by the selected antibody-producing cells, and are sensitive to a medium such as HAT medium. More preferred immortalized cell lines are murine myeloma lines, which can be obtained, for instance, from the Salk Institute Cell Distribution Center, San Diego, Calif. and the American Type Culture Collection, Manassas, Va. Human myeloma and mouse-human heteromyeloma cell lines also have been described for the production of human monoclonal antibodies (Kozbor, J. Immunol., 133:3001 (1984); Brodeur et al., Monoclonal Antibody Production Techniques and Applications, Marcel Dekker, Inc., New York, (1987) pp. 51-63).

[0171] The culture medium in which the hybridoma cells are cultured can then be assayed for the presence of monoclonal antibodies directed against the antigen. Preferably, the binding specificity of monoclonal antibodies produced by the hybridoma cells is determined by immunoprecipitation or by an in vitro binding assay, such as radioimmunoassay (RIA) or enzyme-linked immunoabsorbent assay (ELISA). Such techniques and assays are known in the art. The binding affinity of the monoclonal antibody can, for example, be determined by the Scatchard analysis of Munson and Pollard, Anal. Biochem., 107:220 (1980). It is an objective, especially important in therapeutic applications of monoclonal antibodies, to identify antibodies having a high degree of specificity and a high binding affinity for the target antigen.

[0172] After the desired hybridoma cells are identified, the clones can be subcloned by limiting dilution procedures and grown by standard methods (Goding, 1986). Suitable culture media for this purpose include, for example, Dulbecco's Modified Eagle's Medium and RPMI-1640 medium. Alternatively, the hybridoma cells can be grown in vivo as ascites in a mammal.

[0173] The monoclonal antibodies secreted by the subclones can be isolated or purified from the culture medium or ascites fluid by conventional immunoglobulin purification procedures such as, for example, protein A-Sepharose, hydroxylapatite chromatography, gel electrophoresis, dialysis, or affinity chromatography.

[0174] The monoclonal antibodies can also be made by recombinant DNA methods, such as those described in U.S. Pat. No. 4,816,567. DNA encoding the monoclonal antibodies of the invention can be readily isolated and sequenced using conventional procedures (e.g., by using oligonucleotide probes that are capable of binding specifically to genes encoding the heavy and light chains of murine antibodies). The hybridoma cells of the invention serve as a preferred source of such DNA. Once isolated, the DNA can be placed into expression vectors, which are then transfected into host cells such as simian COS cells, Chinese hamster ovary (CHO) cells, or myeloma cells that do not otherwise produce immunoglobulin protein, to obtain the synthesis of monoclonal antibodies in the recombinant host cells. The DNA also can be modified, for example, by substituting the coding sequence for human heavy and light chain constant domains in place of the homologous murine sequences (U.S. Pat. No. 4,816,567; Morrison, Nature 368, 812-13 (1994)) or by covalently joining to the immunoglobulin coding sequence all or part of the coding sequence for a non-immunoglobulin polypeptide. Such a non-immunoglobulin polypeptide can be substituted for the constant domains of an antibody of the invention, or can be substituted for the variable domains of one antigen-combining site of an antibody of the invention to create a chimeric bivalent antibody.

[0175] Humanized Antibodies

[0176] The antibodies directed against the protein antigens of the invention can further comprise humanized antibodies or human antibodies. These antibodies are suitable for administration to humans without engendering an immune response by the human against the administered immunoglobulin. Humanized forms of antibodies are chimeric immunoglobulins, immunoglobulin chains or fragments thereof (such as Fv, Fab, Fab′, F(ab′)₂ or other antigen-binding subsequences of antibodies) that are principally comprised of the sequence of a human immunoglobulin, and contain minimal sequence derived from a non-human immunoglobulin. Humanization can be performed following the method of Winter and co-workers (Jones et al., Nature, 321:522-525 (1986); Riechmann et al., Nature, 332:323-327 (1988); Verhoeyen et al., Science, 239:1534-1536 (1988)), by substituting rodent CDRs or CDR sequences for the corresponding sequences of a human antibody. (See also U.S. Pat. No. 5,225,539.) In some instances, Fv framework residues of the human immunoglobulin are replaced by corresponding non-human residues. Humanized antibodies can also comprise residues which are found neither in the recipient antibody nor in the imported CDR or framework sequences. In general, the humanized antibody will comprise substantially all of at least one, and typically two, variable domains, in which all or substantially all of the CDR regions correspond to those of a non-human immunoglobulin and all or substantially all of the framework regions are those of a human immunoglobulin consensus sequence. The humanized antibody optimally also will comprise at least a portion of an immunoglobulin constant region (Fc), typically that of a human immunoglobulin (Jones et al., 1986; Riechmann et al., 1988; and Presta, Curr. Op. Struct. Biol., 2:593-596 (1992)).

[0177] Human Antibodies

[0178] Fully human antibodies essentially relate to antibody molecules in which the entire sequence of both the light chain and the heavy chain, including the CDRs, arise from human genes. Such antibodies are termed “human antibodies”, or “fully human antibodies” herein. Human monoclonal antibodies can be prepared by the trioma technique; the human B-cell hybridoma technique (see Kozbor, et al., 1983 Immunol Today 4: 72) and the EBV hybridoma technique to produce human monoclonal antibodies (see Cole, et al., 1985 In: MONOCLONAL ANTIBODIES AND CANCER THERAPY, Alan R. Liss, Inc., pp. 77-96). Human monoclonal antibodies may be utilized in the practice of the present invention and may be produced by using human hybridomas (see Cote, et al., 1983. Proc Natl Acad Sci USA 80: 2026-2030) or by transforming human B-cells with Epstein Barr Virus in vitro (see Cole, et al., 1985 In: MONOCLONAL ANTIBODIES AND CANCER THERAPY, Alan R. Liss, Inc., pp. 77-96).

[0179] In addition, human antibodies can also be produced using additional techniques, including phage display libraries (Hoogenboom and Winter, J. Mol. Biol., 227:381 (1991); Marks et al., J. Mol. Biol., 222:581 (1991)). Similarly, human antibodies can be made by introducing human immunoglobulin loci into transgenic animals, e.g., mice in which the endogenous immunoglobulin genes have been partially or completely inactivated. Upon challenge, human antibody production is observed, which closely resembles that seen in humans in all respects, including gene rearrangement, assembly, and antibody repertoire. This approach is described, for example, in U.S. Pat. Nos. 5,545,807; 5,545,806; 5,569,825; 5,625,126; 5,633,425; 5,661,016, and in Marks et al. (Bio/Technology 10, 779-783 (1992)); Lonberg et al. (Nature 368 856-859 (1994)); Morrison (Nature 368, 812-13 (1994)); Fishwild et al,(Nature Biotechnology 14, 845-51 (1996)); Neuberger (Nature Biotechnology 14, 826 (1996)); and Lonberg and Huszar (Intern. Rev. Immunol. 13 65-93 (1995)).

[0180] Human antibodies may additionally be produced using transgenic nonhuman animals which are modified so as to produce fully human antibodies rather than the animal's endogenous antibodies in response to challenge by an antigen. (See PCT publication WO94/02602). The endogenous genes encoding the heavy and light immunoglobulin chains in the nonhuman host have been incapacitated, and active loci encoding human heavy and light chain immunoglobulins are inserted into the host's genome. The human genes are incorporated, for example, using yeast artificial chromosomes containing the requisite human DNA segments. An animal which provides all the desired modifications is then obtained as progeny by crossbreeding intermediate transgenic animals containing fewer than the full complement of the modifications. The preferred embodiment of such a nonhuman animal is a mouse, and is termed the Xenomouse™ as disclosed in PCT publications WO 96/33735 and WO 96/34096. This animal produces B cells which secrete fully human immunoglobulins. The antibodies can be obtained directly from the animal after immunization with an immunogen of interest, as, for example, a preparation of a polyclonal antibody, or alternatively from immortalized B cells derived from the animal, such as hybridomas producing monoclonal antibodies. Additionally, the genes encoding the immunoglobulins with human variable regions can be recovered and expressed to obtain the antibodies directly, or can be further modified to obtain analogs of antibodies such as, for example, single chain Fv molecules.

[0181] An example of a method of producing a nonhuman host, exemplified as a mouse, lacking expression of an endogenous immunoglobulin heavy chain is disclosed in U.S. Pat. No. 5,939,598. It can be obtained by a method including deleting the J segment genes from at least one endogenous heavy chain locus in an embryonic stem cell to prevent rearrangement of the locus and to prevent formation of a transcript of a rearranged immunoglobulin heavy chain locus, the deletion being effected by a targeting vector containing a gene encoding a selectable marker; and producing from the embryonic stem cell a transgenic mouse whose somatic and germ cells contain the gene encoding the selectable marker.

[0182] A method for producing an antibody of interest, such as a human antibody, is disclosed in U.S. Pat. No. 5,916,771. It includes introducing an expression vector that contains a nucleotide sequence encoding a heavy chain into one mammalian host cell in culture, introducing an expression vector containing a nucleotide sequence encoding a light chain into another mammalian host cell, and fusing the two cells to form a hybrid cell. The hybrid cell expresses an antibody containing the heavy chain and the light chain.

[0183] In a further improvement on this procedure, a method for identifying a clinically relevant epitope on an immunogen, and a correlative method for selecting an antibody that binds immunospecifically to the relevant epitope with high affinity, are disclosed in PCT publication WO 99/53049.

[0184] Fab Fragments and Single Chain Antibodies

[0185] According to the invention, techniques can be adapted for the production of single-chain antibodies specific to an antigenic protein of the invention (see e.g., U.S. Pat. No. 4,946,778). In addition, methods can be adapted for the construction of Fab expression libraries (see e.g., Huse, et al., 1989 Science 246: 1275-1281) to allow rapid and effective identification of monoclonal F_{ab} fragments with the desired specificity for a protein or derivatives, fragments, analogs or homologs thereof. Antibody fragments that contain the idiotypes to a protein antigen may be produced by techniques known in the art including, but not limited to: (i) an F_{(ab′)2} fragment produced by pepsin digestion of an antibody molecule; (ii) an F_{ab} fragment generated by reducing the disulfide bridges of an F_{(ab′)2} fragment; (iii) an F_{ab} fragment generated by the treatment of the antibody molecule with papain and a reducing agent and (iv) Fᵥ fragments.

[0186] Bispecific Antibodies

[0187] Bispecific antibodies are monoclonal, preferably human or humanized, antibodies that have binding specificities for at least two different antigens. In the present case, one of the binding specificities is for an antigenic protein of the invention. The second binding target is any other antigen, and advantageously is a cell-surface protein or receptor or receptor subunit.

[0188] Methods for making bispecific antibodies are known in the art. Traditionally, the recombinant production of bispecific antibodies is based on the co-expression of two immunoglobulin heavy-chain/light-chain pairs, where the two heavy chains have different specificities (Milstein and Cuello, Nature, 305:537-539 (1983)). Because of the random assortment of immunoglobulin heavy and light chains, these hybridomas (quadromas) produce a potential mixture of ten different antibody molecules, of which only one has the correct bispecific structure. The purification of the correct molecule is usually accomplished by affinity chromatography steps. Similar procedures are disclosed in WO 93/08829, published May 13, 1993, and in Traunecker et al., EMBO J., 10:3655-3659 (1991).

[0189] Antibody variable domains with the desired binding specificities (antibody-antigen combining sites) can be fused to immunoglobulin constant domain sequences. The fusion preferably is with an immunoglobulin heavy-chain constant domain, comprising at least part of the hinge, CH2, and CH3 regions. It is preferred to have the first heavy-chain constant region (CH1) containing the site necessary for light-chain binding present in at least one of the fusions. DNAs encoding the immunoglobulin heavy-chain fusions and, if desired, the immunoglobulin light chain, are inserted into separate expression vectors, and are co-transfected into a suitable host organism. For further details of generating bispecific antibodies see, for example, Suresh et al., Methods in Enzymology, 121:210 (1986).

[0190] According to another approach described in WO 96/27011, the interface between a pair of antibody molecules can be engineered to maximize the percentage of heterodimers which are recovered from recombinant cell culture. The preferred interface comprises at least a part of the CH3 region of an antibody constant domain. In this method, one or more small amino acid side chains from the interface of the first antibody molecule are replaced with larger side chains (e.g. tyrosine or tryptophan). Compensatory “cavities” of identical or similar size to the large side chain(s) are created on the interface of the second antibody molecule by replacing large amino acid side chains with smaller ones (e.g. alanine or threonine). This provides a mechanism for increasing the yield of the heterodimer over other unwanted end-products such as homodimers.

[0191] Bispecific antibodies can be prepared as full length antibodies or antibody fragments (e.g. F(ab′)₂ bispecific antibodies). Techniques for generating bispecific antibodies from antibody fragments have been described in the literature. For example, bispecific antibodies can be prepared using chemical linkage. Brennan et al., Science 229:81 (1985) describe a procedure wherein intact antibodies are proteolytically cleaved to generate F(ab′)₂ fragments. These fragments are reduced in the presence of the dithiol complexing agent sodium arsenite to stabilize vicinal dithiols and prevent intermolecular disulfide formation. The Fab′ fragments generated are then converted to thionitrobenzoate (TNB) derivatives. One of the Fab′-TNB derivatives is then reconverted to the Fab′-thiol by reduction with mercaptoethylamine and is mixed with an equimolar amount of the other Fab′-TNB derivative to form the bispecific antibody. The bispecific antibodies produced can be used as agents for the selective immobilization of enzymes.

[0192] Additionally, Fab′ fragments can be directly recovered from E. coli and chemically coupled to form bispecific antibodies. Shalaby et al., J. Exp. Med. 175:217-225 (1992) describe the production of a fully humanized bispecific antibody F(ab′)₂ molecule. Each Fab′ fragment was separately secreted from E. coli and subjected to directed chemical coupling in vitro to form the bispecific antibody. The bispecific antibody thus formed was able to bind to cells overexpressing the ErbB2 receptor and normal human T cells, as well as trigger the lytic activity of human cytotoxic lymphocytes against human breast tumor targets.

[0193] Various techniques for making and isolating bispecific antibody fragments directly from recombinant cell culture have also been described. For example, bispecific antibodies have been produced using leucine zippers. Kostelny et al., J. Immunol. 148(5):1547-1553 (1992). The leucine zipper peptides from the Fos and Jun proteins were linked to the Fab′ portions of two different antibodies by gene fusion. The antibody homodimers were reduced at the hinge region to form monomers and then re-oxidized to form the antibody heterodimers. This method can also be utilized for the production of antibody homodimers. The “diabody” technology described by Hollinger et al., Proc. Natl. Acad. Sci. USA 90:6444-6448 (1993) has provided an alternative mechanism for making bispecific antibody fragments. The fragments comprise a heavy-chain variable domain (V_{H}) connected to a light-chain variable domain (V_{L}) by a linker which is too short to allow pairing between the two domains on the same chain. Accordingly, the V_{H} and V_{L} domains of one fragment are forced to pair with the complementary V_{L} and V_{H} domains of another fragment, thereby forming two antigen-binding sites. Another strategy for making bispecific antibody fragments by the use of single-chain Fv (sFv) dimers has also been reported. See, Gruber et al., J. Immunol. 152:5368 (1994).

[0194] Antibodies with more than two valencies are contemplated. For example, trispecific antibodies can be prepared. Tutt et al., J. Immunol. 147:60 (1991).

[0195] Exemplary bispecific antibodies can bind to two different epitopes, at least one of which originates in the protein antigen of the invention. Alternatively, an anti-antigenic arm of an immunoglobulin molecule can be combined with an arm which binds to a triggering molecule on a leukocyte such as a T-cell receptor molecule (e.g. CD2, CD3, CD28, or B7), or Fc receptors for IgG (FcγR), such as FcγRI (CD64), FcγR11 (CD32) and FcγRIII (CD16) so as to focus cellular defense mechanisms to the cell expressing the particular antigen. Bispecific antibodies can also be used to direct cytotoxic agents to cells which express a particular antigen. These antibodies possess an antigen-binding arm and an arm which binds a cytotoxic agent or a radionuclide chelator, such as EOTUBE, DPTA, DOTA, or TETA. Another bispecific antibody of interest binds the protein antigen described herein and further binds tissue factor (TF).

[0196] Heteroconjugate Antibodies

[0197] Heteroconjugate antibodies are also within the scope of the present invention. Heteroconjugate antibodies are composed of two covalently joined antibodies. Such antibodies have, for example, been proposed to target immune system cells to unwanted cells (U.S. Pat. No. 4,676,980), and for treatment of HIV infection (WO 91/00360; WO 92/200373; EP 03089). It is contemplated that the antibodies can be prepared in vitro using known methods in synthetic protein chemistry, including those involving crosslinking agents. For example, immunotoxins can be constructed using a disulfide exchange reaction or by forming a thioether bond. Examples of suitable reagents for this purpose include iminothiolate and methyl-4-mercaptobutyrimidate and those disclosed, for example, in U.S. Pat. No. 4,676,980.

[0198] Effector Function Engineering

[0199] It can be desirable to modify the antibody of the invention with respect to effector function, so as to enhance, e.g., the effectiveness of the antibody in treating cancer. For example, cysteine residue(s) can be introduced into the Fc region, thereby allowing interchain disulfide bond formation in this region. The homodimeric antibody thus generated can have improved internalization capability and/or increased complement-mediated cell killing and antibody-dependent cellular cytotoxicity (ADCC). See Caron et al., J. Exp Med., 176: 1191-1195 (1992) and Shopes, J. Immunol., 148: 2918-2922 (1992). Homodimeric antibodies with enhanced anti-tumor activity can also be prepared using heterobifunctional cross-linkers as described in Wolff et al. Cancer Research, 53: 2560-2565 (1993). Alternatively, an antibody can be engineered that has dual Fc regions and can thereby have enhanced complement lysis and ADCC capabilities. See Stevenson et al., Anti-Cancer Drug Design, 3: 219-230 (1989).

[0200] Immunoconjugates

[0201] The invention also pertains to immunoconjugates comprising an antibody conjugated to a cytotoxic agent such as a chemotherapeutic agent, toxin (e.g., an enzymatically active toxin of bacterial, fungal, plant, or animal origin, or fragments thereof), or a radioactive isotope (i.e., a radioconjugate).

[0202] Chemotherapeutic agents useful in the generation of such immunoconjugates have been described above. Enzymatically active toxins and fragments thereof that can be used include diphtheria A chain, nonbinding active fragments of diphtheria toxin, exotoxin A chain (from Pseudomonas aeruginosa), ricin A chain, abrin A chain, modeccin A chain, alpha-sarcin, Aleurites fordii proteins, dianthin proteins, Phytolaca americana proteins (PAPI, PAPII, and PAP-S), momordica charantia inhibitor, curcin, crotin, sapaonaria officinalis inhibitor, gelonin, mitogellin, restrictocin, phenomycin, enomycin, and the tricothecenes. A variety of radionuclides are available for the production of radioconjugated antibodies. Examples include ²¹²Bi, ¹³¹I, ¹³¹In, ⁹⁰Y, and ¹⁸⁶Re.

[0203] Conjugates of the antibody and cytotoxic agent are made using a variety of bifunctional protein-coupling agents such as N-succinimidyl-3-(2-pyridyldithiol) propionate (SPDP), iminothiolane (IT), bifunctional derivatives of imidoesters (such as dimethyl adipimidate HCL), active esters (such as disuccinimidyl suberate), aldehydes (such as glutareldehyde), bis-azido compounds (such as bis (p-azidobenzoyl) hexanediamine), bis-diazonium derivatives (such as bis-(p-diazoniumbenzoyl)-ethylenediamine), diisocyanates (such as tolyene 2,6-diisocyanate), and bis-active fluorine compounds (such as 1,5-difluoro-2,4-dinitrobenzene). For example, a ricin immunotoxin can be prepared as described in Vitetta et al., Science, 238: 1098 (1987). Carbon-14-labeled 1-isothiocyanatobenzyl-3-methyldiethylene triaminepentaacetic acid (MX-DTPA) is an exemplary chelating agent for conjugation of radionucleotide to the antibody. See WO94/11026.

[0204] In another embodiment, the antibody can be conjugated to a “receptor” (such streptavidin) for utilization in tumor pretargeting wherein the antibody-receptor conjugate is administered to the patient, followed by removal of unbound conjugate from the circulation using a clearing agent and then administration of a “ligand” (e.g., avidin) that is in turn conjugated to a cytotoxic agent.

[0205] Immunoliposomes

[0206] The antibodies disclosed herein can also be formulated as immunoliposomes. Liposomes containing the antibody are prepared by methods known in the art, such as described in Epstein et al., Proc. Natl. Acad. Sci. USA, 82: 3688 (1985); Hwang et al., Proc. Natl Acad. Sci. USA, 77: 4030 (1980); and U.S. Pat. Nos. 4,485,045 and 4,544,545. Liposomes with enhanced circulation time are disclosed in U.S. Pat. No. 5,013,556.

[0207] Particularly useful liposomes can be generated by the reverse-phase evaporation method with a lipid composition comprising phosphatidylcholine, cholesterol, and PEG-derivatized phosphatidylethanolamine (PEG-PE). Liposomes are extruded through filters of defined pore size to yield liposomes with the desired diameter. Fab′ fragments of the antibody of the present invention can be conjugated to the liposomes as described in Martin et al., J. Biol. Chem., 257: 286-288 (1982) via a disulfide-interchange reaction. A chemotherapeutic agent (such as Doxorubicin) is optionally contained within the liposome. See Gabizon et al., J. National Cancer Inst., 81(19): 1484 (1989).

[0208] Diagnostic Applications of Antibodies Directed Against the Proteins of the Invention

[0209] In one embodiment, methods for the screening of antibodies that possess the desired specificity include, but are not limited to, enzyme linked immunosorbent assay (ELISA) and other immunologically mediated techniques known within the art. In a specific embodiment, selection of antibodies that are specific to a particular domain of an NOVX protein is facilitated by generation of hybridomas that bind to the fragment of an NOVX protein possessing such a domain. Thus, antibodies that are specific for a desired domain within an NOVX protein, or derivatives, fragments, analogs or homologs thereof, are also provided herein.

[0210] Antibodies directed against a NOVX protein of the invention may be used in methods known within the art relating to the localization and/or quantitation of a NOVX protein (e.g., for use in measuring levels of the NOVX protein within appropriate physiological samples, for use in diagnostic methods, for use in imaging the protein, and the like). In a given embodiment, antibodies specific to a NOVX protein, or derivative, fragment, analog or homolog thereof, that contain the antibody derived antigen binding domain, are utilized as pharmacologically active compounds (referred to hereinafter as “Therapeutics”).

[0211] An antibody specific for a NOVX protein of the invention (e.g., a monoclonal antibody or a polyclonal antibody) can be used to isolate a NOVX polypeptide by standard techniques, such as immunoaffinity, chromatography or immunoprecipitation. An antibody to a NOVX polypeptide can facilitate the purification of a natural NOVX antigen from cells, or of a recombinantly produced NOVX antigen expressed in host cells. Moreover, such an anti-NOVX antibody can be used to detect the antigenic NOVX protein (e.g., in a cellular lysate or cell supernatant) in order to evaluate the abundance and pattern of expression of the antigenic NOVX protein. Antibodies directed against a NOVX protein can be used diagnostically to monitor protein levels in tissue as part of a clinical testing procedure, e.g., to, for example, determine the efficacy of a given treatment regimen. Detection can be facilitated by coupling (i.e., physically linking) the antibody to a detectable substance. Examples of detectable substances include various enzymes, prosthetic groups, fluorescent materials, luminescent materials, bioluminescent materials, and radioactive materials. Examples of suitable enzymes include horseradish peroxidase, alkaline phosphatase, β-galactosidase, or acetylcholinesterase; examples of suitable prosthetic group complexes include streptavidin/biotin and avidin/biotin; examples of suitable fluorescent materials include umbelliferone, fluorescein, fluorescein isothiocyanate, rhodamine, dichlorotriazinylamine fluorescein, dansyl chloride or phycoerythrin; an example of a luminescent material includes luminol; examples of bioluminescent materials include luciferase, luciferin, and aequorin, and examples of suitable radioactive material include ¹²⁵I, ¹³¹I, ³⁵S , or ³H.

[0212] Antibody Therapeutics Antibodies of the invention, including polyclonal, monoclonal, humanized and fully human antibodies, may used as therapeutic agents. Such agents will generally be employed to treat or prevent a disease or pathology in a subject. An antibody preparation, preferably one having high specificity and high affinity for its target antigen, is administered to the subject and will generally have an effect due to its binding with the target. Such an effect may be one of two kinds, depending on the specific nature of the interaction between the given antibody molecule and the target antigen in question. In the first instance, administration of the antibody may abrogate or inhibit the binding of the target with an endogenous ligand to which it naturally binds. In this case, the antibody binds to the target and masks a binding site of the naturally occurring ligand, wherein the ligand serves as an effector molecule. Thus the receptor mediates a signal transduction pathway for which ligand is responsible.

[0213] Alternatively, the effect may be one in which the antibody elicits a physiological result by virtue of binding to an effector binding site on the target molecule. In this case the target, a receptor having an endogenous ligand which may be absent or defective in the disease or pathology, binds the antibody as a surrogate effector ligand, initiating a receptor-based signal transduction event by the receptor.

[0214] A therapeutically effective amount of an antibody of the invention relates generally to the amount needed to achieve a therapeutic objective. As noted above, this may be a binding interaction between the antibody and its target antigen that, in certain cases, interferes with the functioning of the target, and in other cases, promotes a physiological response. The amount required to be administered will furthermore depend on the binding affinity of the antibody for its specific antigen, and will also depend on the rate at which an administered antibody is depleted from the free volume other subject to which it is administered. Common ranges for therapeutically effective dosing of an antibody or antibody fragment of the invention may be, by way of nonlimiting example, from about 0.1 mg/kg body weight to about 50 mg/kg body weight. Common dosing frequencies may range, for example, from twice daily to once a week.

[0215] Pharmaceutical Compositions of Antibodies

[0216] Antibodies specifically binding a protein of the invention, as well as other molecules identified by the screening assays disclosed herein, can be administered for the treatment of various disorders in the form of pharmaceutical compositions. Principles and considerations involved in preparing such compositions, as well as guidance in the choice of components are provided, for example, in Remington: The Science And Practice Of Pharmacy 19th ed. (Alfonso R. Gennaro, et al., editors) Mack Pub. Co., Easton, Pa.: 1995; Drug Absorption Enhancement: Concepts, Possibilities, Limitations, And Trends, Harwood Academic Publishers, Langhorne, Pa., 1994; and Peptide And Protein Drug Delivery (Advances In Parenteral Sciences, Vol. 4), 1991, M. Dekker, New York.

[0217] If the antigenic protein is intracellular and whole antibodies are used as inhibitors, internalizing antibodies are preferred. However, liposomes can also be used to deliver the antibody, or an antibody fragment, into cells. Where antibody fragments are used, the smallest inhibitory fragment that specifically binds to the binding domain of the target protein is preferred. For example, based upon the variable-region sequences of an antibody, peptide molecules can be designed that retain the ability to bind the target protein sequence. Such peptides can be synthesized chemically and/or produced by recombinant DNA technology. See, e.g., Marasco et al., Proc. Natl. Acad. Sci. USA, 90: 7889-7893 (1993). The formulation herein can also contain more than one active compound as necessary for the particular indication being treated, preferably those with complementary activities that do not adversely affect each other. Alternatively, or in addition, the composition can comprise an agent that enhances its function, such as, for example, a cytotoxic agent, cytokine, chemotherapeutic agent, or growth-inhibitory agent. Such molecules are suitably present in combination in amounts that are effective for the purpose intended.

[0218] The active ingredients can also be entrapped in microcapsules prepared, for example, by coacervation techniques or by interfacial polymerization, for example, hydroxymethylcellulose or gelatin-microcapsules and poly-(methylmethacrylate) microcapsules, respectively, in colloidal drug delivery systems (for example, liposomes, albumin microspheres, microemulsions, nano-particles, and nanocapsules) or in macroemulsions.

[0219] The formulations to be used for in vivo administration must be sterile. This is readily accomplished by filtration through sterile filtration membranes.

[0220] Sustained-release preparations can be prepared. Suitable examples of sustained-release preparations include semipermeable matrices of solid hydrophobic polymers containing the antibody, which matrices are in the form of shaped articles, e.g., films, or microcapsules. Examples of sustained-release matrices include polyesters, hydrogels (for example, poly(2-hydroxyethyl-methacrylate), or poly(vinylalcohol)), polylactides (U.S. Pat. No. 3,773,919), copolymers of L-glutamic acid and γ ethyl-L-glutamate, non-degradable ethylene-vinyl acetate, degradable lactic acid-glycolic acid copolymers such as the LUPRON DEPOT™ (injectable microspheres composed of lactic acid-glycolic acid copolymer and leuprolide acetate), and poly-D-(−)-3-hydroxybutyric acid. While polymers such as ethylene-vinyl acetate and lactic acid-glycolic acid enable release of molecules for over 100 days, certain hydrogels release proteins for shorter time periods.

[0221] ELISA Assay

[0222] An agent for detecting an analyte protein is an antibody capable of binding to an analyte protein, preferably an antibody with a detectable label. Antibodies can be polyclonal, or more preferably, monoclonal. An intact antibody, or a fragment thereof (e.g., F_{ab} or F_{(ab)2}) can be used. The term “labeled”, with regard to the probe or antibody, is intended to encompass direct labeling of the probe or antibody by coupling (i.e., physically linking) a detectable substance to the probe or antibody, as well as indirect labeling of the probe or antibody by reactivity with another reagent that is directly labeled. Examples of indirect labeling include detection of a primary antibody using a fluorescently-labeled secondary antibody and end-labeling of a DNA probe with biotin such that it can be detected with fluorescently-labeled streptavidin. The term “biological sample” is intended to include tissues, cells and biological fluids isolated from a subject, as well as tissues, cells and fluids present within a subject. Included within the usage of the term “biological sample”, therefore, is blood and a fraction or component of blood including blood serum, blood plasma, or lymph. That is, the detection method of the invention can be used to detect an analyte mRNA, protein, or genomic DNA in a biological sample in vitro as well as in vivo. For example, in vitro techniques for detection of an analyte mRNA include Northern hybridizations and in situ hybridizations. In vitro techniques for detection of an analyte protein include enzyme linked immunosorbent assays (ELISAs), Western blots, immunoprecipitations, and immunofluorescence. In vitro techniques for detection of an analyte genomic DNA include Southern hybridizations. Procedures for conducting immunoassays are described, for example in “ELISA: Theory and Practice: Methods in Molecular Biology”, Vol. 42, J. R. Crowther (Ed.) Human Press, Totowa, N.J., 1995; “Immunoassay”, E. Diamandis and T. Christopoulus, Academic Press, Inc., San Diego, Calif., 1996; and “Practice and Theory of Enzyme Immunoassays”, P. Tijssen, Elsevier Science Publishers, Amsterdam, 1985. Furthermore, in vivo techniques for detection of an analyte protein include introducing into a subject a labeled anti-an analyte protein antibody. For example, the antibody can be labeled with a radioactive marker whose presence and location in a subject can be detected by standard imaging techniques.

[0223] NOVX Recombinant Expression Vectors and Host Cells

[0224] Another aspect of the invention pertains to vectors, preferably expression vectors, containing a nucleic acid encoding a NOVX protein, or derivatives, fragments, analogs or homologs thereof. As used herein, the term “vector” refers to a nucleic acid molecule capable of transporting another nucleic acid to which it has been linked. One type of vector is a “plasmid”, which refers to a circular double stranded DNA loop into which additional DNA segments can be ligated. Another type of vector is a viral vector, wherein additional DNA segments can be ligated into the viral genome. Certain vectors are capable of autonomous replication in a host cell into which they are introduced (e.g., bacterial vectors having a bacterial origin of replication and episomal mammalian vectors). Other vectors (e.g., non-episomal mammalian vectors) are integrated into the genome of a host cell upon introduction into the host cell, and thereby are replicated along with the host genome. Moreover, certain vectors are capable of directing the expression of genes to which they are operatively-linked. Such vectors are referred to herein as “expression vectors”. In general, expression vectors of utility in recombinant DNA techniques are often in the form of plasmids. In the present specification, “plasmid” and “vector” can be used interchangeably as the plasmid is the most commonly used form of vector. However, the invention is intended to include such other forms of expression vectors, such as viral vectors (e.g., replication defective retroviruses, adenoviruses and adeno-associated viruses), which serve equivalent functions.

[0225] The recombinant expression vectors of the invention comprise a nucleic acid of the invention in a form suitable for expression of the nucleic acid in a host cell, which means that the recombinant expression vectors include one or more regulatory sequences, selected on the basis of the host cells to be used for expression, that is operatively-linked to the nucleic acid sequence to be expressed. Within a recombinant expression vector, “operably-linked” is intended to mean that the nucleotide sequence of interest is linked to the regulatory sequence(s) in a manner that allows for expression of the nucleotide sequence (e.g., in an in vitro transcription/translation system or in a host cell when the vector is introduced into the host cell).

[0226] The term “regulatory sequence” is intended to includes promoters, enhancers and other expression control elements (e.g., polyadenylation signals). Such regulatory sequences are described, for example, in Goeddel, GENE EXPRESSION TECHNOLOGY: METHODS IN ENZYMOLOGY 185, Academic Press, San Diego, Calif. (1990). Regulatory sequences include those that direct constitutive expression of a nucleotide sequence in many types of host cell and those that direct expression of the nucleotide sequence only in certain host cells (e.g., tissue-specific regulatory sequences). It will be appreciated by those skilled in the art that the design of the expression vector can depend on such factors as the choice of the host cell to be transformed, the level of expression of protein desired, etc. The expression vectors of the invention can be introduced into host cells to thereby produce proteins or peptides, including fusion proteins or peptides, encoded by nucleic acids as described herein (e.g., NOVX proteins, mutant forms of NOVX proteins, fusion proteins, etc.).

[0227] The recombinant expression vectors of the invention can be designed for expression of NOVX proteins in prokaryotic or eukaryotic cells. For example, NOVX proteins can be expressed in bacterial cells such as Escherichia coli, insect cells (using baculovirus expression vectors) yeast cells or mammalian cells. Suitable host cells are discussed further in Goeddel, GENE EXPRESSION TECHNOLOGY: METHODS IN ENZYMOLOGY 185, Academic Press, San Diego, Calif. (1990). Alternatively, the recombinant expression vector can be transcribed and translated in vitro, for example using T7 promoter regulatory sequences and T7 polymerase.

[0228] Expression of proteins in prokaryotes is most often carried out in Escherichia coli with vectors containing constitutive or inducible promoters directing the expression of either fusion or non-fusion proteins. Fusion vectors add a number of amino acids to a protein encoded therein, usually to the amino terminus of the recombinant protein. Such fusion vectors typically serve three purposes: (i) to increase expression of recombinant protein; (ii) to increase the solubility of the recombinant protein; and (iii) to aid in the purification of the recombinant protein by acting as a ligand in affinity purification. Often, in fusion expression vectors, a proteolytic cleavage site is introduced at the junction of the fusion moiety and the recombinant protein to enable separation of the recombinant protein from the fusion moiety subsequent to purification of the fusion protein. Such enzymes, and their cognate recognition sequences, include Factor Xa, thrombin and enterokinase. Typical fusion expression vectors include pGEX (Pharmacia Biotech Inc; Smith and Johnson, 1988. Gene 67: 31-40), pMAL (New England Biolabs, Beverly, Mass.) and pRIT5 (Pharmacia, Piscataway, N.J.) that fuse glutathione S-transferase (GST), maltose E binding protein, or protein A, respectively, to the target recombinant protein.

[0229] Examples of suitable inducible non-fusion E. coli expression vectors include pTrc (Amrann et al., (1988) Gene 69:301-315) and pET 11d (Studier et al., GENE EXPRESSION TECHNOLOGY: METHODS IN ENZYMOLOGY 185, Academic Press, San Diego, Calif. (1990) 60-89).

[0230] One strategy to maximize recombinant protein expression in E. coli is to express the protein in a host bacteria with an impaired capacity to proteolytically cleave the recombinant protein. See, e.g., Gottesman, GENE EXPRESSION TECHNOLOGY: METHODS IN ENZYMOLOGY 185, Academic Press, San Diego, Calif. (1990) 119-128. Another strategy is to alter the nucleic acid sequence of the nucleic acid to be inserted into an expression vector so that the individual codons for each amino acid are those preferentially utilized in E. coli (see, e.g., Wada, et al., 1992. Nucl. Acids Res. 20: 2111-2118). Such alteration of nucleic acid sequences of the invention can be carried out by standard DNA synthesis techniques.

[0231] In another embodiment, the NOVX expression vector is a yeast expression vector. Examples of vectors for expression in yeast Saccharomyces cerivisae include pYepSec1 (Baldari, et al., 1987. EMBO J. 6: 229-234), pMFa (Kurjan and Herskowitz, 1982. Cell 30: 933-943), pJRY88 (Schultz et al., 1987. Gene 54: 113-123), pYES2 (Invitrogen Corporation, San Diego, Calif.), and picZ (In Vitrogen Corp, San Diego, Calif.).

[0232] Alternatively, NOVX can be expressed in insect cells using baculovirus expression vectors. Baculovirus vectors available for expression of proteins in cultured insect cells (e.g., SF9 cells) include the pAc series (Smith, et al., 1983. Mol. Cell. Biol. 3: 2156-2165) and the pVL series (Lucklow and Summers, 1989. Virology 170: 31-39). In yet another embodiment, a nucleic acid of the invention is expressed in mammalian cells using a mammalian expression vector. Examples of mammalian expression vectors include pCDM8 (Seed, 1987. Nature 329: 840) and pMT2PC (Kaufman, et al., 1987. EMBO J. 6: 187-195). When used in mammalian cells, the expression vector's control functions are often provided by viral regulatory elements. For example, commonly used promoters are derived from polyoma, adenovirus 2, cytomegalovirus, and simian virus 40. For other suitable expression systems for both prokaryotic and eukaryotic cells see, e.g., Chapters 16 and 17 of Sambrook, et al., MOLECULAR CLONING: A LABORATORY MANUAL. 2nd ed., Cold Spring Harbor Laboratory, Cold Spring Harbor Laboratory Press, Cold Spring Harbor, N.Y., 1989.

[0233] In another embodiment, the recombinant mammalian expression vector is capable of directing expression of the nucleic acid preferentially in a particular cell type (e.g., tissue-specific regulatory elements are used to express the nucleic acid). Tissue-specific regulatory elements are known in the art. Non-limiting examples of suitable tissue-specific promoters include the albumin promoter (liver-specific; Pinkert, et al., 1987. Genes Dev. 1: 268-277), lymphoid-specific promoters (Calame and Eaton, 1988. Adv. Immunol. 43: 235-275), in particular promoters of T cell receptors (Winoto and Baltimore, 1989. EMBO J. 8: 729-733) and immunoglobulins (Baneiji, et al., 1983. Cell 33: 729-740; Queen and Baltimore, 1983. Cell 33: 741-748), neuron-specific promoters (e.g., the neurofilament promoter; Byrne and Ruddle, 1989. Proc. Natl. Acad. Sci. USA 86: 5473-5477), pancreas-specific promoters (Edlund, et al., 1985. Science 230: 912-916), and mammary gland-specific promoters (e.g., milk whey promoter; U.S. Pat. No. 4,873,316 and European Application Publication No. 264,166). Developmentally-regulated promoters are also encompassed, e.g., the murine hox promoters (Kessel and Gruss, 1990. Science 249: 374-379) and the α-fetoprotein promoter (Campes and Tilghman, 1989. Genes Dev. 3: 537-546).

[0234] The invention further provides a recombinant expression vector comprising a DNA molecule of the invention cloned into the expression vector in an antisense orientation. That is, the DNA molecule is operatively-linked to a regulatory sequence in a manner that allows for expression (by transcription of the DNA molecule) of an RNA molecule that is antisense to NOVX mRNA. Regulatory sequences operatively linked to a nucleic acid cloned in the antisense orientation can be chosen that direct the continuous expression of the antisense RNA molecule in a variety of cell types, for instance viral promoters and/or enhancers, or regulatory sequences can be chosen that direct constitutive, tissue specific or cell type specific expression of antisense RNA. The antisense expression vector can be in the form of a recombinant plasmid, phagemid or attenuated virus in which antisense nucleic acids are produced under the control of a high efficiency regulatory region, the activity of which can be determined by the cell type into which the vector is introduced. For a discussion of the regulation of gene expression using antisense genes see, e.g., Weintraub, et al., “Antisense RNA as a molecular tool for genetic analysis,” Reviews-Trends in Genetics, Vol. 1(1) 1986.

[0235] Another aspect of the invention pertains to host cells into which a recombinant expression vector of the invention has been introduced. The terms “host cell” and “recombinant host cell” are used interchangeably herein. It is understood that such terms refer not only to the particular subject cell but also to the progeny or potential progeny of such a cell. Because certain modifications may occur in succeeding generations due to either mutation or environmental influences, such progeny may not, in fact, be identical to the parent cell, but are still included within the scope of the term as used herein.

[0236] A host cell can be any prokaryotic or eukaryotic cell. For example, NOVX protein can be expressed in bacterial cells such as E. coli, insect cells, yeast or mammalian cells (such as Chinese hamster ovary cells (CHO) or COS cells). Other suitable host cells are known to those skilled in the art.

[0237] Vector DNA can be introduced into prokaryotic or eukaryotic cells via conventional transformation or transfection techniques. As used herein, the terms “transformation” and “transfection” are intended to refer to a variety of art-recognized techniques for introducing foreign nucleic acid (e.g., DNA) into a host cell, including calcium phosphate or calcium chloride co-precipitation, DEAE-dextran-mediated transfection, lipofection, or electroporation. Suitable methods for transforming or transfecting host cells can be found in Sambrook, et al. (MOLECULAR CLONING: A LABORATORY MANUAL. 2nd ed., Cold Spring Harbor Laboratory, Cold Spring Harbor Laboratory Press, Cold Spring Harbor, N.Y., 1989), and other laboratory manuals.

[0238] For stable transfection of mammalian cells, it is known that, depending upon the expression vector and transfection technique used, only a small fraction of cells may integrate the foreign DNA into their genome. In order to identify and select these integrants, a gene that encodes a selectable marker (e.g., resistance to antibiotics) is generally introduced into the host cells along with the gene of interest. Various selectable markers include those that confer resistance to drugs, such as G418, hygromycin and methotrexate. Nucleic acid encoding a selectable marker can be introduced into a host cell on the same vector as that encoding NOVX or can be introduced on a separate vector. Cells stably transfected with the introduced nucleic acid can be identified by drug selection (e.g., cells that have incorporated the selectable marker gene will survive, while the other cells die).

[0239] A host cell of the invention, such as a prokaryotic or eukaryotic host cell in culture, can be used to produce (i.e., express) NOVX protein. Accordingly, the invention further provides methods for producing NOVX protein using the host cells of the invention. In one embodiment, the method comprises culturing the host cell of invention (into which a recombinant expression vector encoding NOVX protein has been introduced) in a suitable medium such that NOVX protein is produced. In another embodiment, the method further comprises isolating NOVX protein from the medium or the host cell.

[0240] Transgenic NOVX Animals

[0241] The host cells of the invention can also be used to produce non-human transgenic animals. For example, in one embodiment, a host cell of the invention is a fertilized oocyte or an embryonic stem cell into which NOVX protein-coding sequences have been introduced. Such host cells can then be used to create non-human transgenic animals in which exogenous NOVX sequences have been introduced into their genome or homologous recombinant animals in which endogenous NQVX sequences have been altered. Such animals are useful for studying the function and/or activity of NOVX protein and for identifying and/or evaluating modulators of NOVX protein activity. As used herein, a “transgenic animal” is a non-human animal, preferably a mammal, more preferably a rodent such as a rat or mouse, in which one or more of the cells of the animal includes a transgene. Other examples of transgenic animals include non-human primates, sheep, dogs, cows, goats, chickens, amphibians, etc. A transgene is exogenous DNA that is integrated into the genome of a cell from which a transgenic animal develops and that remains in the genome of the mature animal, thereby directing the expression of an encoded gene product in one or more cell types or tissues of the transgenic animal. As used herein, a “homologous recombinant animal” is a non-human animal, preferably a mammal, more preferably a mouse, in which an endogenous NOVX gene has been altered by homologous recombination between the endogenous gene and an exogenous DNA molecule introduced into a cell of the animal, e.g., an embryonic cell of the animal, prior to development of the animal.

[0242] A transgenic animal of the invention can be created by introducing NOVX-encoding nucleic acid into the male pronuclei of a fertilized oocyte (e.g., by microinjection, retroviral infection) and allowing the oocyte to develop in a pseudopregnant female foster animal. The human NOVX cDNA sequences, i.e., any one of SEQ ID NO:2n-1, wherein n is an integer between 1 and 66, can be introduced as a transgene into the genome of a non-human animal. Alternatively, a non-human homologue of the human NOVX gene, such as a mouse NOVX gene, can be isolated based on hybridization to the human NOVX cDNA (described further supra) and used as a transgene. Intronic sequences and polyadenylation signals can also be included in the transgene to increase the efficiency of expression of the transgene. A tissue-specific regulatory sequence(s) can be operably-linked to the NOVX transgene to direct expression of NOVX protein to particular cells. Methods for generating transgenic animals via embryo manipulation and microinjection, particularly animals such as mice, have become conventional in the art and are described, for example, in U.S. Pat. Nos. 4,736,866; 4,870,009; and 4,873,191; and Hogan, 1986. In: MANIPULATING THE MOUSE EMBRYO, Cold Spring Harbor Laboratory Press, Cold Spring Harbor, N.Y. Similar methods are used for production of other transgenic animals. A transgenic founder animal can be identified based upon the presence of the NOVX transgene in its genome and/or expression of NOVX mRNA in tissues or cells of the animals. A transgenic founder animal can then be used to breed additional animals carrying the transgene. Moreover, transgenic animals carrying a transgene-encoding NOVX protein can further be bred to other transgenic animals carrying other transgenes.

[0243] To create a homologous recombinant animal, a vector is prepared which contains at least a portion of a NOVX gene into which a deletion, addition or substitution has been introduced to thereby alter, e.g., functionally disrupt, the NOVX gene. The NOVX gene can be a human gene (e.g., the cDNA of any one of SEQ ID NO:2n-1, wherein n is an integer between 1 and 66), but more preferably, is a non-human homologue of a human NOVX gene. For example, a mouse homologue of human NOVX gene of SEQ ID NO:2n-1, wherein n is an integer between 1 and 66, can be used to construct a homologous recombination vector suitable for altering an endogenous NOVX gene in the mouse genome. In one embodiment, the vector is designed such that, upon homologous recombination, the endogenous NOVX gene is functionally disrupted (i.e., no longer encodes a functional protein; also referred to as a “knock out” vector).

[0244] Alternatively, the vector can be designed such that, upon homologous recombination, the endogenous NOVX gene is mutated or otherwise altered but still encodes functional protein (e.g., the upstream regulatory region can be altered to thereby alter the expression of the endogenous NOVX protein). In the homologous recombination vector, the altered portion of the NOVX gene is flanked at its 5′- and 3′-termini by additional nucleic acid of the NOVX gene to allow for homologous recombination to occur between the exogenous NOVX gene carried by the vector and an endogenous NOVX gene in an embryonic stem cell. The additional flanking NOVX nucleic acid is of sufficient length for successful homologous recombination with the endogenous gene. Typically, several kilobases of flanking DNA (both at the 5′- and 3′-termini) are included in the vector. See, e.g., Thomas, et al., 1987. Cell 51: 503 for a description of homologous recombination vectors. The vector is ten introduced into an embryonic stem cell line (e.g., by electroporation) and cells in which the introduced NOVX gene has homologously-recombined with the endogenous NOVX gene are selected. See, e.g., Li, et al., 1992. Cell 69: 915.

[0245] The selected cells are then injected into a blastocyst of an animal (e.g., a mouse) to form aggregation chimeras. See, e.g., Bradley, 1987. In: TERATOCARCINOMAS AND EMBRYONIC STEM CELLS: A PRACTICAL APPROACH, Robertson, ed. IRL, Oxford, pp. 113-152. A chimeric embryo can then be implanted into a suitable pseudopregnant female foster animal and the embryo brought to term. Progeny harboring the homologously-recombined DNA in their germ cells can be used to breed animals in which all cells of the animal contain the homologously-recombined DNA by germline transmission of the transgene. Methods for constructing homologous recombination vectors and homologous recombinant animals are described further in Bradley, 1991. Curr. Opin. Biotechnol. 2: 823-829; PCT International Publication Nos.: WO 90/11354; WO 91/01140; WO 92/0968; and WO 93/04169.

[0246] In another embodiment, transgenic non-humans animals can be produced that contain selected systems that allow for regulated expression of the transgene. One example of such a system is the cre/loxP recombinase system of bacteriophage P1. For a description of the cre/loxP recombinase system, See, e.g., Lakso, et al., 1992. Proc. Natl. Acad. Sci. USA 89: 6232-6236. Another example of a recombinase system is the FLP recombinase system of Saccharomyces cerevisiae. See, O'Gorman, et al., 1991. Science 251:1351-1355. If a cre/loxP recombinase system is used to regulate expression of the transgene, animals containing transgenes encoding both the Cre recombinase and a selected protein are required. Such animals can be provided through the construction of “double” transgenic animals, e.g., by mating two transgenic animals, one containing a transgene encoding a selected protein and the other containing a transgene encoding a recombinase.

[0247] Clones of the non-human transgenic animals described herein can also be produced according to the methods described in Wilmut, et al., 1997. Nature 385: 810-813. In brief, a cell (e.g., a somatic cell) from the transgenic animal can be isolated and induced to exit the growth cycle and enter Go phase. The quiescent cell can then be fused, e.g., through the use of electrical pulses, to an enucleated oocyte from an animal of the same species from which the quiescent cell is isolated. The reconstructed oocyte is then cultured such that it develops to morula or blastocyte and then transferred to pseudopregnant female foster animal. The offspring borne of this female foster animal will be a clone of the animal from which the cell (e.g., the somatic cell) is isolated.

[0248] Pharmaceutical Compositions

[0249] The NOVX nucleic acid molecules, NOVX proteins, and anti-NOVX antibodies (also referred to herein as “active compounds”) of the invention, and derivatives, fragments, analogs and homologs thereof, can be incorporated into pharmaceutical compositions suitable for administration. Such compositions typically comprise the nucleic acid molecule, protein, or antibody and a pharmaceutically acceptable carrier. As used herein, “pharmaceutically acceptable carrier” is intended to include any and all solvents, dispersion media, coatings, antibacterial and antifungal agents, isotonic and absorption delaying agents, and the like, compatible with pharmaceutical administration. Suitable carriers are described in the most recent edition of Remington's Pharmaceutical Sciences, a standard reference text in the field, which is incorporated herein by reference. Preferred examples of such carriers or diluents include, but are not limited to, water, saline, finger's solutions, dextrose solution, and 5% human serum albumin. Liposomes and non-aqueous vehicles such as fixed oils may also be used. The use of such media and agents for pharmaceutically active substances is well known in the art. Except insofar as any conventional media or agent is incompatible with the active compound, use thereof in the compositions is contemplated. Supplementary active compounds can also be incorporated into the compositions.

[0250] A pharmaceutical composition of the invention is formulated to be compatible with its intended route of administration. Examples of routes of administration include parenteral, e.g., intravenous, intradermal, subcutaneous, oral (e.g., inhalation), transdermal (i.e., topical), transmucosal, and rectal administration. Solutions or suspensions used for parenteral, intradermal, or subcutaneous application can include the following components: a sterile diluent such as water for injection, saline solution, fixed oils, polyethylene glycols, glycerine, propylene glycol or other synthetic solvents; antibacterial agents such as benzyl alcohol or methyl parabens; antioxidants such as ascorbic acid or sodium bisulfite; chelating agents such as ethylenediaminetetraacetic acid (EDTA); buffers such as acetates, citrates or phosphates, and agents for the adjustment of tonicity such as sodium chloride or dextrose. The pH can be adjusted with acids or bases, such as hydrochloric acid or sodium hydroxide. The parenteral preparation can be enclosed in ampoules, disposable syringes or multiple dose vials made of glass or plastic.

[0251] Pharmaceutical compositions suitable for injectable use include sterile aqueous solutions (where water soluble) or dispersions and sterile powders for the extemporaneous preparation of sterile injectable solutions or dispersion. For intravenous administration, suitable carriers include physiological saline, bacteriostatic water, Cremophor EL: (BASF, Parsippany, N.J.) or phosphate buffered saline (PBS). In all cases, the composition must be sterile and should be fluid to the extent that easy syringeability exists. It must be stable under the conditions of manufacture and storage and must be preserved against the contaminating action of microorganisms such as bacteria and fungi. The carrier can be a solvent or dispersion medium containing, for example, water, ethanol, polyol (for example, glycerol, propylene glycol, and liquid polyethylene glycol, and the like), and suitable mixtures thereof. The proper fluidity can be maintained, for example, by the use of a coating such as lecithin, by the maintenance of the required particle size in the case of dispersion and by the use of surfactants. Prevention of the action of microorganisms can be achieved by various antibacterial and antifungal agents, for example, parabens, chlorobutanol, phenol, ascorbic acid, thimerosal, and the like. In many cases, it will be preferable to include isotonic agents, for example, sugars, polyalcohols such as manitol, sorbitol, sodium chloride in the composition. Prolonged absorption of the injectable compositions can be brought about by including in the composition an agent which delays absorption, for example, aluminum monostearate and gelatin.

[0252] Sterile injectable solutions can be prepared by incorporating the active compound (e.g., a NOVX protein or anti-NOVX antibody) in the required amount in an appropriate solvent with one or a combination of ingredients enumerated above, as required, followed by filtered sterilization. Generally, dispersions are prepared by incorporating the active compound into a sterile vehicle that contains a basic dispersion medium and the required other ingredients from those enumerated above. In the case of sterile powders for the preparation of sterile injectable solutions, methods of preparation are vacuum drying and freeze-drying that yields a powder of the active ingredient plus any additional desired ingredient from a previously sterile-filtered solution thereof.

[0253] Oral compositions generally include an inert diluent or an edible carrier. They can be enclosed in gelatin capsules or compressed into tablets. For the purpose of oral therapeutic administration, the active compound can be incorporated with excipients and used in the form of tablets, troches, or capsules. Oral compositions can also be prepared using a fluid carrier for use as a mouthwash, wherein the compound in the fluid carrier is applied orally and swished and expectorated or swallowed. Pharmaceutically compatible binding agents, and/or adjuvant materials can be included as part of the composition. The tablets, pills, capsules, troches and the like can contain any of the following ingredients, or compounds of a similar nature: a binder such as microcrystalline cellulose, gum tragacanth or gelatin; an excipient such as starch or lactose, a disintegrating agent such as alginic acid, Primogel, or corn starch; a lubricant such as magnesium stearate or Sterotes; a glidant such as colloidal silicon dioxide; a sweetening agent such as sucrose or saccharin; or a flavoring agent such as peppermint, methyl salicylate, or orange flavoring.

[0254] For administration by inhalation, the compounds are delivered in the form of an aerosol spray from pressured container or dispenser which contains a suitable propellant, e.g., a gas such as carbon dioxide, or a nebulizer.

[0255] Systemic administration can also be by transmucosal or transdermal means. For transmucosal or transdermal administration, penetrants appropriate to the barrier to be permeated are used in the formulation. Such penetrants are generally known in the art, and include, for example, for transmucosal administration, detergents, bile salts, and fusidic acid derivatives. Transmucosal administration can be accomplished through the use of nasal sprays or suppositories. For transdermal administration, the active compounds are formulated into ointments, salves, gels, or creams as generally known in the art.

[0256] The compounds can also be prepared in the form of suppositories (e.g., with conventional suppository bases such as cocoa butter and other glycerides) or retention enemas for rectal delivery.

[0257] In one embodiment, the active compounds are prepared with carriers that will protect the compound against rapid elimination from the body, such as a controlled release formulation, including implants and microencapsulated delivery systems. Biodegradable, biocompatible polymers can be used, such as ethylene vinyl acetate, polyanhydrides, polyglycolic acid, collagen, polyorthoesters, and polylactic acid. Methods for preparation of such formulations will be apparent to those skilled in the art. The materials can also be obtained commercially from Alza Corporation and Nova Pharmaceuticals, Inc. Liposomal suspensions (including liposomes targeted to infected cells with monoclonal antibodies to viral antigens) can also be used as pharmaceutically acceptable carriers. These can be prepared according to methods known to those skilled in the art, for example, as described in U.S. Pat. No. 4,522,811.

[0258] It is especially advantageous to formulate oral or parenteral compositions in dosage unit form for ease of administration and uniformity of dosage. Dosage unit form as used herein refers to physically discrete units suited as unitary dosages for the subject to be treated; each unit containing a predetermined quantity of active compound calculated to produce the desired therapeutic effect in association with the required pharmaceutical carrier. The specification for the dosage unit forms of the invention are dictated by and directly dependent on the unique characteristics of the active compound and the particular therapeutic effect to be achieved, and the limitations inherent in the art of compounding such an active compound for the treatment of individuals.

[0259] The nucleic acid molecules of the invention can be inserted into vectors and used as gene therapy vectors. Gene therapy vectors can be delivered to a subject by, for example, intravenous injection, local administration (see, e.g., U.S. Pat. No. 5,328,470) or by stereotactic injection (see, e.g., Chen, et al., 1994. Proc. Natl. Acad. Sci. USA 91: 3054-3057). The pharmaceutical preparation of the gene therapy vector can include the gene therapy vector in an acceptable diluent, or can comprise a slow release matrix in which the gene delivery vehicle is imbedded. Alternatively, where the complete gene delivery vector can be produced intact from recombinant cells, e.g., retroviral vectors, the pharmaceutical preparation can include one or more cells that produce the gene delivery system.

[0260] The pharmaceutical compositions can be included in a container, pack, or dispenser together with instructions for administration.

[0261] Screening and Detection Methods

[0262] The isolated nucleic acid molecules of the invention can be used to express NOVX protein (e.g., via a recombinant expression vector in a host cell in gene therapy applications), to detect NOVX m-RNA (e.g., in a biological sample) or a genetic lesion in a NOVX gene, and to modulate NOVX activity, as described further, below. In addition, the NOVX proteins can be used to screen drugs or compounds that modulate the NOVX protein activity or expression as well as to treat disorders characterized by insufficient or excessive production of NOVX protein or production of NOVX protein forms that have decreased or aberrant activity compared to NOVX wild-type protein (e.g.; diabetes (regulates insulin release); obesity (binds and transport lipids); metabolic disturbances associated with obesity, the metabolic syndrome X as well as anorexia and wasting disorders associated with chronic diseases and various cancers, and infectious disease(possesses anti-microbial activity) and the various dyslipidemias. In addition, the anti-NOVX antibodies of the invention can be used to detect and isolate NOVX proteins and modulate NOVX activity. In yet a further aspect, the invention can be used in methods to influence appetite, absorption of nutrients and the disposition of metabolic substrates in both a positive and negative fashion.

[0263] The invention further pertains to novel agents identified by the screening assays described herein and uses thereof for treatments as described, supra.

[0264] Screening Assays

[0265] The invention provides a method (also referred to herein as a “screening assay”) for identifying modulators, i.e., candidate or test compounds or agents (e.g., peptides, peptidomimetics, small molecules or other drugs) that bind to NOVX proteins or have a stimulatory or inhibitory effect on, e.g., NOVX protein expression or NOVX protein activity. The invention also includes compounds identified in the screening assays described herein.

[0266] In one embodiment, the invention provides assays for screening candidate or test compounds which bind to or modulate the activity of the membrane-bound form of a NOVX protein or polypeptide or biologically-active portion thereof. The test compounds of the invention can be obtained using any of the numerous approaches in combinatorial library methods known in the art, including: biological libraries; spatially addressable parallel solid phase or solution phase libraries; synthetic library methods requiring deconvolution; the “one-bead one-compound” library method; and synthetic library methods using affinity chromatography selection. The biological library approach is limited to peptide libraries, while the other four approaches are applicable to peptide, non-peptide oligomer or small molecule libraries of compounds. See, e.g., Lam, 1997. Anticancer Drug Design 12: 145.

[0267] A “small molecule” as used herein, is meant to refer to a composition that has a molecular weight of less than about 5 kD and most preferably less than about 4 kD. Small molecules can be, e.g., nucleic acids, peptides, polypeptides, peptidomimetics, carbohydrates, lipids or other organic or inorganic molecules. Libraries of chemical and/or biological mixtures, such as fungal, bacterial, or algal extracts, are known in the art and can be screened with any of the assays of the invention.

[0268] Examples of methods for the synthesis of molecular libraries can be found in the art, for example in: DeWitt, et al., 1993. Proc. Natl. Acad. Sci. U.S.A. 90: 6909; Erb, et al., 1994. Proc. Natl. Acad. Sci. U.S.A. 91: 11422; Zuckermann, et al., 1994. J. Med. Chem. 37: 2678; Cho, et al., 1993. Science 261: 1303; Carrell, et al., 1994. Angew. Chem. Int. Ed. Engl. 33: 2059; Carrell, et al., 1994. Angew. Chem. Int. Ed. Engl. 33: 2061; and Gallop, et al., 1994. J. Med. Chem. 37: 1233.

[0269] Libraries of compounds may be presented in solution (e.g., Houghten, 1992. Biotechniques 13: 412-421), or on beads (Lam, 1991. Nature 354: 82-84), on chips (Fodor, 1993. Nature 364: 555-556), bacteria (Ladner, U.S. Pat. No. 5,223,409), spores (Ladner, U.S. Pat. No. 5,233,409), plasmids (Cull, et al., 1992. Proc. Natl. Acad. Sci. USA 89: 1865-1869) or on phage (Scott and Smith, 1990. Science 249: 386-390; Devlin, 1990. Science 249: 404-406; Cwirla, et al., 1990. Proc. Natl. Acad. Sci. U.S.A. 87: 6378-6382; Felici, 1991. J. Mol. Biol. 222: 301-310; Ladner, U.S. Pat. No. 5,233,409.).

[0270] In one embodiment, an assay is a cell-based assay in which a cell which expresses a membrane-bound form of NOVX protein, or a biologically-active portion thereof, on the cell surface is contacted with a test compound and the ability of the test compound to bind to a NOVX protein determined. The cell, for example, can of mammalian origin or a yeast cell. Determining the ability of the test compound to bind to the NOVX protein can be accomplished, for example, by coupling the test compound with a radioisotope or enzymatic label such that binding of the test compound to the NOVX protein or biologically-active portion thereof can be determined by detecting the labeled compound in a complex. For example, test compounds can be labeled with ¹²⁵I, ³⁵S, ¹⁴C, or ³H, either directly or indirectly, and the radioisotope detected by direct counting of radioemission or by scintillation counting. Alternatively, test compounds can be enzymatically-labeled with, for example, horseradish peroxidase, alkaline phosphatase, or luciferase, and the enzymatic label detected by determination of conversion of an appropriate substrate to product. In one embodiment, the assay comprises contacting a cell which expresses a membrane-bound form of NOVX protein, or a biologically-active portion thereof, on the cell surface with a known compound which binds NOVX to form an assay mixture, contacting the assay mixture with a test compound, and determining the ability of the test compound to interact with a NOVX protein, wherein determining the ability of the test compound to interact with a NOVX protein comprises determining the ability of the test compound to preferentially bind to NOVX protein or a biologically-active portion thereof as compared to the known compound.

[0271] In another embodiment, an assay is a cell-based assay comprising contacting a cell expressing a membrane-bound form of NOVX protein, or a biologically-active portion thereof, on the cell surface with a test compound and determining the ability of the test compound to modulate (e.g., stimulate or inhibit) the activity of the NOVX protein or biologically-active portion thereof. Determining the ability of the test compound to modulate the activity of NOVX or a biologically-active portion thereof can be accomplished, for example, by determining the ability of the NOVX protein to bind to or interact with a NOVX target molecule. As used herein, a “target molecule” is a molecule with which a NOVX protein binds or interacts in nature, for example, a molecule on the surface of a cell which expresses a NOVX interacting protein, a molecule on the surface of a second cell, a molecule in the extracellular milieu, a molecule associated with the internal surface of a cell membrane or a cytoplasmic molecule. A NOVX target molecule can be a non-NOVX molecule or a NOVX protein or polypeptide of the invention. In one embodiment, a NOVX target molecule is a component of a signal transduction pathway that facilitates transduction of an extracellular signal (e.g. a signal generated by binding of a compound to a membrane-bound NOVX molecule) through the cell membrane and into the cell. The target, for example, can be a second intercellular protein that has catalytic activity or a protein that facilitates the association of downstream signaling molecules with NOVX.

[0272] Determining the ability of the NOVX protein to bind to or interact with a NOVX target molecule can be accomplished by one of the methods described above for determining direct binding. In one embodiment, determining the ability of the NOVX protein to bind to or interact with a NOVX target molecule can be accomplished by determining the activity of the target molecule. For example, the activity of the target molecule can be determined by detecting induction of a cellular second messenger of the target (i.e. intracellular Ca²⁺, diacylglycerol, IP₃, etc.), detecting catalytic/enzymatic activity of the target an appropriate substrate, detecting the induction of a reporter gene (comprising a NOVX-responsive regulatory element operatively linked to a nucleic acid encoding a detectable marker, e.g., luciferase), or detecting a cellular response, for example, cell survival, cellular differentiation, or cell proliferation.

[0273] In yet another embodiment, an assay of the invention is a cell-free assay comprising contacting a NOVX protein or biologically-active portion thereof with a test compound and determining the ability of the test compound to bind to the NOVX protein or biologically-active portion thereof. Binding of the test compound to the NOVX protein can be determined either directly or indirectly as described above. In one such embodiment, the assay comprises contacting the NOVX protein or biologically-active portion thereof with a known compound which binds NOVX to form an assay mixture, contacting the assay mixture with a test compound, and determining the ability of the test compound to interact with a NOVX protein, wherein determining the ability of the test compound to interact with a NOVX protein comprises determining the ability of the test compound to preferentially bind to NOVX or biologically-active portion thereof as compared to the known compound.

[0274] In still another embodiment, an assay is a cell-free assay comprising contacting NOVX protein or biologically-active portion thereof with a test compound and determining the ability of the test compound to modulate (e.g. stimulate or inhibit) the activity of the NOVX protein or biologically-active portion thereof. Determining the ability of the test compound to modulate the activity of NOVX can be accomplished, for example, by determining the ability of the NOVX protein to bind to a NOVX target molecule by one of the methods described above for determining direct binding. In an alternative embodiment, determining the ability of the test compound to modulate the activity of NOVX protein can be accomplished by determining the ability of the NOVX protein further modulate a NOVX target molecule. For example, the catalytic/enzymatic activity of the target molecule on an appropriate substrate can be determined as described, supra.

[0275] In yet another embodiment, the cell-free assay comprises contacting the NOVX protein or biologically-active portion thereof with a known compound which binds NOVX protein to form an assay mixture, contacting the assay mixture with a test compound, and determining the ability of the test compound to interact with a NOVX protein, wherein determining the ability of the test compound to interact with a NOVX protein comprises determining the ability of the NOVX protein to preferentially bind to or modulate the activity of a NOVX target molecule.

[0276] The cell-free assays of the invention are amenable to use of both the soluble form or the membrane-bound form of NOVX protein. In the case of cell-free assays comprising the membrane-bound form of NOVX protein, it may be desirable to utilize a solubilizing agent such that the membrane-bound form of NOVX protein is maintained in solution. Examples of such solubilizing agents include non-ionic detergents such as n-octylglucoside, n-dodecylglucoside, n-dodecylmaltoside, octanoyl-N-methylglucamide, decanoyl-N-methylglucamide, Triton® X-100, Triton® X-114, Thesit®, Isotridecypoly(ethylene glycol ether)ₙ, N-dodecyl—N,N-dimethyl-3-ammonio-1-propane sulfonate, 3-(3-cholamidopropyl) dimethylamminiol-1-propane sulfonate (CHAPS), or 3-(3-cholamidopropyl)dimethylamminiol-2-hydroxy-1-propane sulfonate (CHAPSO).

[0277] In more than one embodiment of the above assay methods of the invention, it may be desirable to immobilize either NOVX protein or its target molecule to facilitate separation of complexed from uncomplexed forms of one or both of the proteins, as well as to accommodate automation of the assay. Binding of a test compound to NOVX protein, or interaction of NOVX protein with a target molecule in the presence and absence of a candidate compound, can be accomplished in any vessel suitable for containing the reactants. Examples of such vessels include microtiter plates, test tubes, and micro-centrifuge tubes. In one embodiment, a fusion protein can be provided that adds a domain that allows one or both of the proteins to be bound to a matrix. For example, GST-NOVX fusion proteins or GST-target fusion proteins can be adsorbed onto glutathione sepharose beads (Sigma Chemical, St. Louis, Mo.) or glutathione derivatized microtiter plates, that are then combined with the test compound or the test compound and either the non-adsorbed target protein or NOVX protein, and the mixture is incubated under conditions conducive to complex formation (e.g., at physiological conditions for salt and pH). Following incubation, the beads or microtiter plate wells are washed to remove any unbound components, the matrix immobilized in the case of beads, complex determined either directly or indirectly, for example, as described, supra. Alternatively, the complexes can be dissociated from the matrix, and the level of NOVX protein binding or activity determined using standard techniques.

[0278] Other techniques for immobilizing proteins on matrices can also be used in the screening assays of the invention. For example, either the NOVX protein or its target molecule can be immobilized utilizing conjugation of biotin and streptavidin. Biotinylated NOVX protein or target molecules can be prepared from biotin-NHS (N-hydroxy-succinimide) using techniques well-known within the art (e.g., biotinylation kit, Pierce Chemicals, Rockford, Ill.), and immobilized in the wells of streptavidin-coated 96 well plates (Pierce Chemical). Alternatively, antibodies reactive with NOVX protein or target molecules, but which do not interfere with binding of the NOVX protein to its target molecule, can be derivatized to the wells of the plate, and unbound target or NOVX protein trapped in the wells by antibody conjugation. Methods for detecting such complexes, in addition to those described above for the GST-immobilized complexes, include immunodetection of complexes using antibodies reactive with the NOVX protein or target molecule, as well as enzyme-linked assays that rely on detecting an enzymatic activity associated with the NOVX protein or target molecule.

[0279] In another embodiment, modulators of NOVX protein expression are identified in a method wherein a cell is contacted with a candidate compound and the expression of NOVX mRNA or protein in the cell is determined. The level of expression of NOVX mRNA or protein in the presence of the candidate compound is compared to the level of expression of NOVX mRNA or protein in the absence of the candidate compound. The candidate compound can then be identified as a modulator of NOVX mRNA or protein expression based upon this comparison. For example, when expression of NOVX mRNA or protein is greater (i.e., statistically significantly greater) in the presence of the candidate compound than in its absence, the candidate compound is identified as a stimulator of NOVX mRNA or protein expression. Alternatively, when expression of NOVX mRNA or protein is less (statistically significantly less) in the presence of the candidate compound than in its absence, the candidate compound is identified as an inhibitor of NOVX mRNA or protein expression. The level of NOVX mRNA or protein expression in the cells can be determined by methods described herein for detecting NOVX mRNA or protein.

[0280] In yet another aspect of the invention, the NOVX proteins can be used as “bait proteins” in a two-hybrid assay or three hybrid assay (see, e.g., U.S. Pat. No. 5,283,317; Zervos, et al., 1993. Cell 72: 223-232; Madura, et al., 1993. J. Biol. Chem. 268: 12046-12054; Bartel, et al., 1993. Biotechniques 14: 920-924; Iwabuchi, et al., 1993. Oncogene 8: 1693-1696; and Brent WO 94/10300), to identify other proteins that bind to or interact with NOVX (“NOVX-binding proteins” or “NOVX-bp”) and modulate NOVX activity. Such NOVX-binding proteins are also involved in the propagation of signals by the NOVX proteins as, for example, upstream or downstream elements of the NOVX pathway.

[0281] The two-hybrid system is based on the modular nature of most transcription factors, which consist of separable DNA-binding and activation domains. Briefly, the assay utilizes two different DNA constructs. In one construct, the gene that codes for NOVX is fused to a gene encoding the DNA binding domain of a known transcription factor (e.g., GAL-4). In the other construct, a DNA sequence, from a library of DNA sequences, that encodes an unidentified protein (“prey” or “sample”) is fused to a gene that codes for the activation domain of the known transcription factor. If the “bait” and the “prey” proteins are able to interact, in vivo, forming a NOVX-dependent complex, the DNA-binding and activation domains of the transcription factor are brought into close proximity. This proximity allows transcription of a reporter gene (e.g., LacZ) that is operably linked to a transcriptional regulatory site responsive to the transcription factor. Expression of the reporter gene can be detected and cell colonies containing the functional transcription factor can be isolated and used to obtain the cloned gene that encodes the protein which interacts with NOVX.

[0282] The invention further pertains to novel agents identified by the aforementioned screening assays and uses thereof for treatments as described herein.

[0283] Detection Assays

[0284] Portions or fragments of the cDNA sequences identified herein (and the corresponding complete gene sequences) can be used in numerous ways as polynucleotide reagents. By way of example, and not of limitation, these sequences can be used to: (i) map their respective genes on a chromosome; and, thus, locate gene regions associated with genetic disease; (ii) identify an individual from a minute biological sample (tissue typing); and (iii) aid in forensic identification of a biological sample. Some of these applications are described in the subsections, below.

[0285] Chromosome Mapping

[0286] Once the sequence (or a portion of the sequence) of a gene has been isolated, this sequence can be used to map the location of the gene on a chromosome. This process is called chromosome mapping. Accordingly, portions or fragments of the NOVX sequences of SEQ ID NO:2n-1, wherein n is an integer between 1 and 66, or fragments or derivatives thereof, can be used to map the location of the NOVX genes, respectively, on a chromosome. The mapping of the NOVX sequences to chromosomes is an important first step in correlating these sequences with genes associated with disease.

[0287] Briefly, NOVX genes can be mapped to chromosomes by preparing PCR primers (preferably 15-25 bp in length) from the NOVX sequences. Computer analysis of the NOVX, sequences can be used to rapidly select primers that do not span more than one exon in the genomic DNA, thus complicating the amplification process. These primers can then be used for PCR screening of somatic cell hybrids containing individual human chromosomes. Only those hybrids containing the human gene corresponding to the NOVX sequences will yield an amplified fragment.

[0288] Somatic cell hybrids are prepared by fusing somatic cells from different mammals (eg., human and mouse cells). As hybrids of human and mouse cells grow and divide, they gradually lose human chromosomes in random order, but retain the mouse chromosomes. By using media in which mouse cells cannot grow, because they lack a particular enzyme, but in which human cells can, the one human chromosome that contains the gene encoding the needed enzyme will be retained. By using various media, panels of hybrid cell lines can be established. Each cell line in a panel contains either a single human chromosome or a small number of human chromosomes, and a full set of mouse chromosomes, allowing easy mapping of individual genes to specific human chromosomes. See, e.g., D'Eustachio, et al., 1983. Science 220: 919-924. Somatic cell hybrids containing only fragments of human chromosomes can also be produced by using human chromosomes with translocations and deletions.

[0289] PCR mapping of somatic cell hybrids is a rapid procedure for assigning a particular sequence to a particular chromosome. Three or more sequences can be assigned per day using a single thermal cycler. Using the NOVX sequences to design oligonucleotide primers, sub-localization can be achieved with panels of fragments from specific chromosomes.

[0290] Fluorescence in situ hybridization (FISH) of a DNA sequence to a metaphase chromosomal spread can further be used to provide a precise chromosomal location in one step. Chromosome spreads can be made using cells whose division has been blocked in metaphase by a chemical like colcemid that disrupts the mitotic spindle. The chromosomes can be treated briefly with trypsin, and then stained with Giemsa. A pattern of light and dark bands develops on each chromosome, so that the chromosomes can be identified individually. The FISH technique can be used with a DNA sequence as short as 500 or 600 bases. However, clones larger than 1,000 bases have a higher likelihood of binding to a unique chromosomal location with sufficient signal intensity for simple detection. Preferably 1,000 bases, and more preferably 2,000 bases, will suffice to get good results at a reasonable amount of time. For a review of this technique, see, Verma, et al., HUMAN CHROMOSOMES: A MANUAL OF BASIC TECHNIQUES (Pergamon Press, New York 1988).

[0291] Reagents for chromosome mapping can be used individually to mark a single chromosome or a single site on that chromosome, or panels of reagents can be used for marking multiple sites and/or multiple chromosomes. Reagents corresponding to noncoding regions of the genes actually are preferred for mapping purposes. Coding sequences are more likely to be conserved within gene families, thus increasing the chance of cross hybridizations during chromosomal mapping.

[0292] Once a sequence has been mapped to a precise chromosomal location, the physical position of the sequence on the chromosome can be correlated with genetic map data. Such data are found, e.g., in McKusick, MENDELIAN INHERITANCE IN MAN, available on-line through Johns Hopkins University Welch Medical Library). The relationship between genes and disease, mapped to the same chromosomal region, can then be identified through linkage analysis (co-inheritance of physically adjacent genes), described in, e.g., Egeland, et al., 1987. Nature, 325: 783-787.

[0293] Moreover, differences in the DNA sequences between individuals affected and unaffected with a disease associated with the NOVX gene, can be determined. If a mutation is observed in some or all of the affected individuals but not in any unaffected individuals, then the mutation is likely to be the causative agent of the particular disease. Comparison of affected and unaffected individuals generally involves first looking for structural alterations in the chromosomes, such as deletions or translocations that are visible from chromosome spreads or detectable using PCR based on that DNA sequence. Ultimately, complete sequencing of genes from several individuals can be performed to confirm the presence of a mutation and to distinguish mutations from polymorphisms.

[0294] Tissue Typing

[0295] The NOVX sequences of the invention can also be used to identify individuals from minute biological samples. In this technique, an individual's genomic DNA is digested with one or more restriction enzymes, and probed on a Southern blot to yield unique bands for identification. The sequences of the invention are useful as additional DNA markers for RFLP (“restriction fragment length polymorphisms,” described in U.S. Pat. No. 5,272,057).

[0296] Furthermore, the sequences of the invention can be used to provide an alternative technique that determines the actual base-by-base DNA sequence of selected portions of an individual's genome. Thus, the NOVX sequences described herein can be used to prepare two PCR primers from the 5′- and 3′-termini of the sequences. These primers can then be used to amplify an individual's DNA and subsequently sequence it.

[0297] Panels of corresponding DNA sequences from individuals, prepared in this manner, can provide unique individual identifications, as each individual will have a unique set of such DNA sequences due to allelic differences. The sequences of the invention can be used to obtain such identification sequences from individuals and from tissue. The NOVX sequences of the invention uniquely represent portions of the human genome. Allelic variation occurs to some degree in the coding regions of these sequences, and to a greater degree in the noncoding regions. It is estimated that allelic variation between individual humans occurs with a frequency of about once per each 500 bases. Much of the allelic variation is due to single nucleotide polymorphisms (SNPs), which include restriction fragment length polymorphisms (RFLPs).

[0298] Each of the sequences described herein can, to some degree, be used as a standard against which DNA from an individual can be compared for identification purposes. Because greater numbers of polymorphisms occur in the noncoding regions, fewer sequences are necessary to differentiate individuals. The noncoding sequences can comfortably provide positive individual identification with a panel of perhaps 10 to 1,000 primers that each yield a noncoding amplified sequence of 100 bases. If coding sequences, such as those of SEQ ID NO:2n-1, wherein n is an integer between 1 and 66, are used, a more appropriate number of primers for positive individual identification would be 500-2,000.

[0299] Predictive Medicine

[0300] The invention also pertains to the field of predictive medicine in which diagnostic assays, prognostic assays, pharmacogenomics, and monitoring clinical trials are used for prognostic (predictive) purposes to thereby treat an individual prophylactically. Accordingly, one aspect of the invention relates to diagnostic assays for determining NOVX protein and/or nucleic acid expression as well as NOVX activity, in the context of a biological sample (e.g., blood, serum, cells, tissue) to thereby determine whether an individual is afflicted with a disease or disorder, or is at risk of developing a disorder, associated with aberrant NOVX expression or activity. The disorders include metabolic disorders, diabetes, obesity, infectious disease, anorexia, cancer-associated cachexia, cancer, neurodegenerative disorders, Alzheimer's Disease, Parkinson's Disorder, immune disorders, and hematopoietic disorders, and the various dyslipidemias, metabolic disturbances associated with obesity, the metabolic syndrome X and wasting disorders associated with chronic diseases and various cancers. The invention also provides for prognostic (or predictive) assays for determining whether an individual is at risk of developing a disorder associated with NOVX protein, nucleic acid expression or activity. For example, mutations in a NOVX gene can be assayed in a biological sample. Such assays can be used for prognostic or predictive purpose to thereby prophylactically treat an individual prior to the onset of a disorder characterized by or associated with NOVX protein, nucleic acid expression, or biological activity.

[0301] Another aspect of the invention provides methods for determining NOVX protein, nucleic acid expression or activity in an individual to thereby select appropriate therapeutic or prophylactic agents for that individual (referred to herein as “pharmacogenomics”). Pharmacogenomics allows for the selection of agents (e.g., drugs) for therapeutic or prophylactic treatment of an individual based on the genotype of the individual (e.g., the genotype of the individual examined to determine the ability of the individual to respond to a particular agent.)

[0302] Yet another aspect of the invention pertains to monitoring the influence of agents (e.g., drugs, compounds) on the expression or activity of NOVX in clinical trials.

[0303] These and other agents are described in further detail in the following sections.

[0304] Diagnostic Assays

[0305] An exemplary method for detecting the presence or absence of NOVX in a biological sample involves obtaining a biological sample from a test subject and contacting the biological sample with a compound or an agent capable of detecting NOVX protein or nucleic acid (e.g., mRNA, genomic DNA) that encodes NOVX protein such that the presence of NOVX is detected in the biological sample. An agent for detecting NOVX mRNA or genomic DNA is a labeled nucleic acid probe capable of hybridizing to NOVX mRNA or genomic DNA. The nucleic acid probe can be, for example, a full-length NOVX nucleic acid, such as the nucleic acid of SEQ ID NO:2n-1, wherein n is an integer between. 1 and 66, or a portion thereof, such as an oligonucleotide of at least 15, 30, 50, 100, 250 or 500 nucleotides in length and sufficient to specifically hybridize under stringent conditions to NOVX mRNA or genomic DNA. Other suitable probes for use in the diagnostic assays of the invention are described herein.

[0306] An agent for detecting NOVX protein is an antibody capable of binding to NOVX protein, preferably an antibody with a detectable label. Antibodies can be polyclonal, or more preferably, monoclonal. An intact antibody, or a fragment thereof (e.g., Fab or F(ab′)₂) can be used. The term “labeled”, with regard to the probe or antibody, is intended to encompass direct labeling of the probe or antibody by coupling (i.e., physically linking) a detectable substance to the probe or antibody, as well as indirect labeling of the probe or antibody by reactivity with another reagent that is directly labeled. Examples of indirect labeling include detection of a primary antibody using a fluorescently-labeled secondary antibody and end-labeling of a DNA probe with biotin such that it can be detected with fluorescently-labeled streptavidin. The term “biological sample” is intended to include tissues, cells and biological fluids isolated from a subject, as well as tissues, cells and fluids present within a subject. That is, the detection method of the invention can be used to detect NOVX mRNA, protein, or genomic DNA in a biological sample in vitro as well as in vivo. For example, in vitro techniques for detection of NOVX mRNA include Northern hybridizations and in situ hybridizations. In vitro techniques for detection of NOVX protein include enzyme linked immunosorbent assays (ELISAs), Western blots, immunoprecipitations, and immunofluorescence. In vitro techniques for detection of NOVX genomic DNA include Southern hybridizations. Furthermore, in vivo techniques for detection of NOVX protein include introducing into a subject a labeled anti-NOVX antibody. For example, the antibody can be labeled with a radioactive marker whose presence and location in a subject can be detected by standard imaging techniques.

[0307] In one embodiment, the biological sample contains protein molecules from the test subject. Alternatively, the biological sample can contain mRNA molecules from the test subject or genomic DNA molecules from the test subject. A preferred biological sample is a peripheral blood leukocyte sample isolated by conventional means from a subject.

[0308] In another embodiment, the methods further involve obtaining a control biological sample from a control subject, contacting the control sample with a compound or agent capable of detecting NOVX protein, mRNA, or genomic DNA, such that the presence of NOVX protein, mRNA or genomic DNA is detected in the biological sample, and comparing the presence of NOVX protein, mRNA or genomic DNA in the control sample with the presence of NOVX protein, mRNA or genomic DNA in the test sample.

[0309] The invention also encompasses kits for detecting the presence of NOVX in a biological sample. For example, the kit can comprise: a labeled compound or agent capable of detecting NOVX protein or mRNA in a biological sample; means for determining the amount of NOVX in the sample; and means for comparing the amount of NOVX in the sample with a standard. The compound or agent can be packaged in a suitable container. The kit can further comprise instructions for using the kit to detect NOVX protein or nucleic acid.

[0310] Prognostic Assays

[0311] The diagnostic methods described herein can furthermore be utilized to identify subjects having or at risk of developing a disease or disorder associated with aberrant NOVX expression or activity. For example, the assays described herein, such as the preceding diagnostic assays or the following assays, can be utilized to identify a subject having or at risk of developing a disorder associated with NOVX protein, nucleic acid expression or activity. Alternatively, the prognostic assays can be utilized to identify a subject having or at risk for developing a disease or disorder. Thus, the invention provides a method for identifying a disease or disorder associated with aberrant NOVX expression or activity in which a test sample is obtained from a subject and NOVX protein or nucleic acid (e.g., mRNA, genomic DNA) is detected, wherein the presence of NOVX protein or nucleic acid is diagnostic for a subject having or at risk of developing a disease or disorder associated with aberrant NOVX expression or activity. As used herein, a “test sample” refers to a biological sample obtained from a subject of interest. For example, a test sample can be a biological fluid (e.g., serum), cell sample, or tissue.

[0312] Furthermore, the prognostic assays described herein can be used to determine whether a subject can be administered an agent (e.g., an agonist, antagonist, peptidomimetic, protein, peptide, nucleic acid, small molecule, or other drug candidate) to treat a disease or disorder associated with aberrant NOVX expression or activity. For example, such methods can be used to determine whether a subject can be effectively treated with an agent for a disorder. Thus, the invention provides methods for determining whether a subject can be effectively treated with an agent for a disorder associated with aberrant NOVX expression or activity in which a test sample is obtained and NOVX protein or nucleic acid is detected (e.g., wherein the presence of NOVX protein or nucleic acid is diagnostic for a subject that can be administered the agent to treat a disorder associated with aberrant NOVX expression or activity).

[0313] The methods of the invention can also be used to detect genetic lesions in a NOVX gene, thereby determining if a subject with the lesioned gene is at risk for a disorder characterized by aberrant cell proliferation and/or differentiation. In various embodiments, the methods include detecting, in a sample of cells from the subject, the presence or absence of a genetic lesion characterized by at least one of an alteration affecting the integrity of a gene encoding a NOVX-protein, or the misexpression of the NOVX gene. For example, such genetic lesions can be detected by ascertaining the existence of at least one of: (i) a deletion of one or more nucleotides from a NOVX gene; (ii) an addition of one or more nucleotides to a NOVX gene; (iii) a substitution of one or more nucleotides of a NOVX gene, (iv) a chromosomal rearrangement of a NOVX gene; (v) an alteration in the level of a messenger RNA transcript of a NOVX gene, (vi) aberrant modification of a NOVX gene, such as of the methylation pattern of the genomic DNA, (vii) the presence of a non-wild-type splicing pattern of a messenger RNA transcript of a NOVX gene, (viii) a non-wild-type level of a NOVX protein, (ix) allelic loss of a NOVX gene, and (x) inappropriate post-translational modification of a NOVX protein. As described herein, there are a large number of assay techniques known in the art which can be used for detecting lesions in a NOVX gene. A preferred biological sample is a peripheral blood leukocyte sample isolated by conventional means from a subject. However, any biological sample containing nucleated cells may be used, including, for example, buccal mucosal cells.

[0314] In certain embodiments, detection of the lesion involves the use of a probe/primer in a polymerase chain reaction (PCR) (see, e.g., U.S. Pat. Nos. 4,683,195 and 4,683,202), such as anchor PCR or RACE PCR, or, alternatively, in a ligation chain reaction (LCR) (see, e.g., Landegran, et al., 1988. Science 241: 1077-1080; and Nakazawa, et al., 1994. Proc. Natl. Acad. Sci. USA 91: 360-364), the latter of which can be particularly useful for detecting point mutations in the NOVX-gene (see, Abravaya, et al., 1995. Nucl. Acids Res. 23: 675-682). This method can include the steps of collecting a sample of cells from a patient, isolating nucleic acid (e.g., genomic, mRNA or both) from the cells of the sample, contacting the nucleic acid sample with one or more primers that specifically hybridize to a NOVX gene under conditions such that hybridization and amplification of the NOVX gene (if present) occurs, and detecting the presence or absence of an amplification product, or detecting the size of the amplification product and comparing the length to a control sample. It is anticipated that PCR and/or LCR may be desirable to use as a preliminary amplification step in conjunction with any of the techniques used for detecting mutations described herein.

[0315] Alternative amplification methods include: self sustained sequence replication (see, Guatelli, et al., 1990. Proc. Natl. Acad. Sci. USA 87: 1874-1878), transcriptional amplification system (see, Kwoh, et al., 1989. Proc. Natl. Acad. Sci. USA 86: 1173-1177); Qβ Replicase (see, Lizardi, et al, 1988BioTechnology 6: 1197), or any other nucleic acid amplification method, followed by the detection of the amplified molecules using techniques well known to those of skill in the art. These detection schemes are especially useful for the detection of nucleic acid molecules if such molecules are present in very low numbers.

[0316] In an alternative embodiment, mutations in a NOVX gene from a sample cell can be identified by alterations in restriction enzyme cleavage patterns. For example, sample and control DNA is isolated, amplified (optionally), digested with one or more restriction endonucleases, and fragment length sizes are determined by gel electrophoresis and compared. Differences in fragment length sizes between sample and control DNA indicates mutations in the sample DNA. Moreover, the use of sequence specific ribozymes (see, e.g., U.S. Pat. No. 5,493,531) can be used to score for the presence of specific mutations by development or loss of a ribozyme cleavage site.

[0317] In other embodiments, genetic mutations in NOVX can be identified by hybridizing a sample and control nucleic acids, e.g., DNA or RNA, to high-density arrays containing hundreds or thousands of oligonucleotides probes. See, e.g., Cronin, et al., 1996. Human Mutation 7: 244-255; Kozal, et al., 1996. Nat. Med. 2: 753-759. For example, genetic mutations in NOVX can be identified in two dimensional arrays containing light-generated DNA probes as described in Cronin, et al., supra. Briefly, a first hybridization array of probes can be used to scan through long stretches of DNA in a sample and control to identify base changes between the sequences by making linear arrays of sequential overlapping probes. This step allows the identification of point mutations. This is followed by a second hybridization array that allows the characterization of specific mutations by using smaller, specialized probe arrays complementary to all variants or mutations detected. Each mutation array is composed of parallel probe sets, one complementary to the wild-type gene and the other complementary to the mutant gene.

[0318] In yet another embodiment, any of a variety of sequencing reactions known in the art can be used to directly sequence the NOVX gene and detect mutations by comparing the sequence of the sample NOVX with the corresponding wild-type (control) sequence. Examples of sequencing reactions include those based on techniques developed by Maxim and Gilbert, 1977. Proc. Natl. Acad. Sci. USA 74: 560 or Sanger, 1977. Proc. Natl. Acad. Sci. USA 74: 5463. It is also contemplated that any of a variety of automated sequencing procedures can be utilized when performing the diagnostic assays (see, e.g., Naeve, et al., 1995. Biotechniques 19: 448), including sequencing by mass spectrometry (see, e.g., PCT International Publication No. WO 94/16101; Cohen, et al., 1996. Adv. Chromatography 36: 127-162; and Griffin, et al., 1993. Appl. Biochem. Biotechnol. 38: 147-159).

[0319] Other methods for detecting mutations in the NOVX gene include methods in which protection from cleavage agents is used to detect mismatched bases in RNA/RNA or RNA/DNA heteroduplexes. See, e.g., Myers, et al., 1985. Science 230: 1242. In general, the art technique of “mismatch cleavage” starts by providing heteroduplexes of formed by hybridizing (labeled) RNA or DNA containing the wild-type NOVX sequence with potentially mutant RNA or DNA obtained from a tissue sample. The double-stranded duplexes are treated with an agent that cleaves single-stranded regions of the duplex such as which will exist due to basepair mismatches between the control and sample strands. For instance, RNA/DNA duplexes can be treated with RNase and DNA/DNA hybrids treated with S₁ nuclease to enzymatically digesting the mismatched regions. In other embodiments, either DNA/DNA or RNA/DNA duplexes can be treated with hydroxylamine or osmium tetroxide and with piperidine in order to digest mismatched regions. After digestion of the mismatched regions, the resulting material is then separated by size on denaturing polyacrylamide gels to determine the site of mutation. See, e.g., Cotton, et al., 1988. Proc. Natl. Acad. Sci. USA 85: 4397; Saleeba, et al., 1992. Methods Enzymol. 217: 286-295. In an embodiment, the control DNA or RNA can be labeled for detection.

[0320] In still another embodiment, the mismatch cleavage reaction employs one or more proteins that recognize mismatched base pairs in double-stranded DNA (so called “DNA mismatch repair” enzymes) in defined systems for detecting and mapping point mutations in NOVX cDNAs obtained from samples of cells. For example, the mutY enzyme of E. coli cleaves A at G/A mismatches and the thymidine DNA glycosylase from HeLa cells cleaves T at G/T mismatches. See, e.g., Hsu, et al., 1994. Carcinogenesis 15: 1657-1662. According to an exemplary embodiment, a probe based on a NOVX sequence, e.g., a wild-type NOVX sequence, is hybridized to a cDNA or other DNA product from a test cell(s). The duplex is treated with a DNA mismatch repair enzyme, and the cleavage products, if any, can be detected from electrophoresis protocols or the like. See, e.g., U.S. Pat. No. 5,459,039.

[0321] In other embodiments, alterations in electrophoretic mobility will be used to identify mutations in NOVX genes. For example, single strand conformation polymorphism (SSCP) may be used to detect differences in electrophoretic mobility between mutant and wild type nucleic acids. See, e.g., Orita, et al., 1989. Proc. Natl. Acad. Sci. USA: 86: 2766; Cotton, 1993. Mutat. Res. 285: 125-144; Hayashi, 1992. Genet. Anal. Tech. Appl. 9: 73-79. Single-stranded DNA fragments of sample and control NOVX nucleic acids will be denatured and allowed to renature. The secondary structure of single-stranded nucleic acids varies according to sequence, the resulting alteration in electrophoretic mobility enables the detection of even a single base change. The DNA fragments may be labeled or detected with labeled probes. The sensitivity of the assay may be enhanced by using RNA (rather than DNA), in which the secondary structure is more sensitive to a change in sequence. In one embodiment, the subject method utilizes heteroduplex analysis to separate double stranded heteroduplex molecules on the basis of changes in electrophoretic mobility. See, e.g., Keen, et al., 1991. Trends Genet. 7: 5.

[0322] In yet another embodiment, the movement of mutant or wild-type fragments in polyacrylamide gels containing a gradient of denaturant is assayed using denaturing gradient gel electrophoresis (DGGE). See, e.g., Myers, et al., 1985. Nature 313: 495. When DGGE is used as the method of analysis, DNA will be modified to insure that it does not completely denature, for example by adding a GC clamp of approximately 40 bp of high-melting GC-rich DNA by PCR. In a further embodiment, a temperature gradient is used in place of a denaturing gradient to identify differences in the mobility of control and sample DNA. See, e.g., Rosenbaum and Reissner, 1987. Biophys. Chem. 265:12753.

[0323] Examples of other techniques for detecting point mutations include, but are not limited to, selective oligonucleotide hybridization, selective amplification, or selective primer extension. For example, oligonucleotide primers may be prepared in which the known mutation is placed centrally and then hybridized to target DNA under conditions that permit hybridization only if a perfect match is found. See, e.g., Saiki, et al., 1986. Nature 324: 163; Saiki, et al., 1989. Proc. Natl. Acad. Sci. USA 86: 6230. Such allele specific oligonucleotides are hybridized to PCR amplified target DNA or a number of different mutations when the oligonucleotides are attached to the hybridizing membrane and hybridized with labeled target DNA.

[0324] Alternatively, allele specific amplification technology that depends on selective PCR amplification may be used in conjunction with the instant invention. Oligonucleotides used as primers for specific amplification may carry the mutation of interest in the center of the molecule (so that amplification depends on differential hybridization; see, e.g., Gibbs, et al., 1989. Nucl. Acids Res. 17: 2437-2448) or at the extreme 3′-terminus of one primer where, under appropriate conditions, mismatch can prevent, or reduce polymerase extension (see, e.g., Prossner, 1993. Tibtech. 11: 238). In addition it may be desirable to introduce a novel restriction site in the region of the mutation to create cleavage-based detection. See, e.g., Gasparini, et al., 1992. Mol. Cell Probes 6: 1. It is anticipated that in certain embodiments amplification may also be performed using Taq ligase for amplification. See, e.g. Barany, 1991. Proc. Natl. Acad. Sci. USA 88: 189. In such cases, ligation will occur only if there is a perfect match at the 3′-terminus of the 5′ sequence, making it possible to detect the presence of a known mutation at a specific site by looking for the presence or absence of amplification.

[0325] The methods described herein may be performed, for example, by utilizing pre-packaged diagnostic kits comprising at least one probe nucleic acid or antibody reagent described herein, which may be conveniently used, e.g., in clinical settings to diagnose patients exhibiting symptoms or family history of a disease or illness involving a NOVX gene.

[0326] Furthermore, any cell type or tissue, preferably peripheral blood leukocytes, in which NOVX is expressed may be utilized in the prognostic assays described herein. However, any biological sample containing nucleated cells may be used, including, for example, buccal mucosal cells.

[0327] Pharmacogenomics

[0328] Agents, or modulators that have a stimulatory or inhibitory effect on NOVX activity (e.g., NOVX gene expression), as identified by a screening assay described herein can be administered to individuals to treat (prophylactically or therapeutically) disorders. The disorders include but are not limited to, e.g., those diseases, disorders and conditions listed above, and more particularly include those diseases, disorders, or conditions associated with homologs of a NOVX protein, such as those summarized in Table A.

[0329] In conjunction with such treatment, the pharmacogenomics (i.e., the study of the relationship between an individual's genotype and that individual's response to a foreign compound or drug) of the individual may be considered. Differences in metabolism of therapeutics can lead to severe toxicity or therapeutic failure by altering the relation between dose and blood concentration of the pharmacologically active drug. Thus, the pharmacogenomics of the individual permits the selection of effective agents (e.g., drugs) for prophylactic or therapeutic treatments based on a consideration of the individual's genotype. Such pharmacogenomics can further be used to determine appropriate dosages and therapeutic regimens. Accordingly, the activity of NOVX protein, expression of NOVX nucleic acid, or mutation content of NOVX genes in an individual can be determined to thereby select appropriate agent(s) for therapeutic or prophylactic treatment of the individual.

[0330] Pharmacogenomics deals with clinically significant hereditary variations in the response to drugs due to altered drug disposition and abnormal action in affected persons. See e.g., Eichelbaum, 1996. Clin. Exp. Pharmacol. Physiol., 23: 983-985; Linder, 1997. Clin. Chem., 43: 254-266. In general, two types of pharmacogenetic conditions can be differentiated. Genetic conditions transmitted as a single factor altering the way drugs act on the body (altered drug action) or genetic conditions transmitted as single factors altering the way the body acts on drugs (altered drug metabolism). These pharmacogenetic conditions can occur either as rare defects or as polymorphisms. For example, glucose-6-phosphate dehydrogenase (G6PD) deficiency is a common inherited enzymopathy in which the main clinical complication is hemolysis after ingestion of oxidant drugs (anti-malarials, sulfonamides, analgesics, nitrofurans) and consumption of fava beans.

[0331] As an illustrative embodiment, the activity of drug metabolizing enzymes is a major determinant of both the intensity and duration of drug action. The discovery of genetic polymorphisms of drug metabolizing enzymes (e.g., N-acetyltransferase 2 (NAT 2) and cytochrome pregnancy zone protein precursor enzymes CYP2D6 and CYP2C19) has provided an explanation as to why some patients do not obtain the expected drug effects or show exaggerated drug response and serious toxicity after taking the standard and safe dose of a drug. These polymorphisms are expressed in two phenotypes in the population, the extensive metabolizer (EM) and poor metabolizer (PM). The prevalence of PM is different among different populations. For example, the gene coding for CYP2D6 is highly polymorphic and several mutations have been identified in PM, which all lead to the absence of functional CYP2D6. Poor metabolizers of CYP2D6 and CYP2C19 quite frequently experience exaggerated drug response and side effects when they receive standard doses. If a metabolite is the active therapeutic moiety, PM show no therapeutic response, as demonstrated for the analgesic effect of codeine mediated by its CYP2D6-formed metabolite morphine. At the other extreme are the so called ultra-rapid metabolizers who do not respond to standard doses. Recently, the molecular basis of ultra-rapid metabolism has been identified to be due to CYP2D6 gene amplification.

[0332] Thus, the activity of NOVX protein, expression of NOVX nucleic acid, or mutation content of NOVX genes in an individual can be determined to thereby select appropriate agent(s) for therapeutic or prophylactic treatment of the individual. In addition, pharmacogenetic studies can be used to apply genotyping of polymorphic alleles encoding drug-metabolizing enzymes to the identification of an individual's drug responsiveness phenotype. This knowledge, when applied to dosing or drug selection, can avoid adverse reactions or therapeutic failure and thus enhance therapeutic or prophylactic efficiency when treating a subject with a NOVX modulator, such as a modulator identified by one of the exemplary screening assays described herein.

[0333] Monitoring of Effects During Clinical Trials

[0334] Monitoring the influence of agents (e.g., drugs, compounds) on the expression or activity of NOVX (e.g., the ability to modulate aberrant cell proliferation and/or differentiation) can be applied not only in basic drug screening, but also in clinical trials. For example, the effectiveness of an agent determined by a screening assay as described herein to increase NOVX gene expression, protein levels, or upregulate NOVX activity, can be monitored in clinical trails of subjects exhibiting decreased NOVX gene expression, protein levels, or downregulated NOVX activity. Alternatively, the effectiveness of an agent determined by a screening assay to decrease NOVX gene expression, protein levels, or downregulate NOVX activity, can be monitored in clinical trails of subjects exhibiting increased NOVX gene expression, protein levels, or upregulated NOVX activity. In such clinical trials, the expression or activity of NOVX and, preferably, other genes that have been implicated in, for example, a cellular proliferation or immune disorder can be used as a “read out” or markers of the immune responsiveness of a particular cell.

[0335] By way of example, and not of limitation, genes, including NOVX, that are modulated in cells by treatment with an agent (e.g., compound, drug or small molecule) that modulates NOVX activity (e.g., identified in a screening assay as described herein) can be identified. Thus, to study the effect of agents on cellular proliferation disorders, for example, in a clinical trial, cells can be isolated and RNA prepared and analyzed for the levels of expression of NOVX and other genes implicated in the disorder. The levels of gene expression (i.e., a gene expression pattern) can be quantified by Northern blot analysis or RT-PCR, as described herein, or alternatively by measuring the amount of protein produced, by one of the methods as described herein, or by measuring the levels of activity of NOVX or other genes. In this manner, the gene expression pattern can serve as a marker, indicative of the physiological response of the cells to the agent. Accordingly, this response state may be determined before, and at various points during, treatment of the individual with the agent.

[0336] In one embodiment, the invention provides a method for monitoring the effectiveness of treatment of a subject with an agent (e.g., an agonist, antagonist, protein, peptide, peptidomimetic, nucleic acid, small molecule, or other drug candidate identified by the screening assays described herein) comprising the steps of (i) obtaining a pre-administration sample from a subject prior to administration of the agent; (ii) detecting the level of expression of a NOVX protein, mRNA, or genomic DNA in the preadministration sample; (iii) obtaining one or more post-administration samples from the subject; (iv) detecting the level of expression or activity of the NOVX protein, mRNA, or genomic DNA in the post-administration samples; (v) comparing the level of expression or activity of the NOVX protein, mRNA, or genomic DNA in the pre-administration sample with the NOVX protein, mRNA, or genomic DNA in the post administration sample or samples; and (vi) altering the administration of the agent to the subject accordingly. For example, increased administration of the agent may be desirable to increase the expression or activity of NOVX to higher levels than detected, i.e., to increase the effectiveness of the agent. Alternatively, decreased administration of the agent may be desirable to decrease expression or activity of NOVX to lower levels than detected, i.e., to decrease the effectiveness of the agent.

[0337] Methods of Treatment

[0338] The invention provides for both prophylactic and therapeutic methods of treating a subject at risk of (or susceptible to) a disorder or having a disorder associated with aberrant NOVX expression or activity. The disorders include but are not limited to, e.g., those diseases, disorders and conditions listed above, and more particularly include those diseases, disorders, or conditions associated with homologs of a NOVX protein, such as those summarized in Table A.

[0339] These methods of treatment will be discussed more fully, below.

[0340] Diseases and Disorders

[0341] Diseases and disorders that are characterized by increased (relative to a subject not suffering from the disease or disorder) levels or biological activity may be treated with Therapeutics that antagonize (i.e., reduce or inhibit) activity. Therapeutics that antagonize activity may be administered in a therapeutic or prophylactic manner. Therapeutics that may be utilized include, but are not limited to: (i) an aforementioned peptide, or analogs, derivatives, fragments or homologs thereof, (ii) antibodies to an aforementioned peptide; (iii) nucleic acids encoding an aforementioned peptide; (iv) administration of antisense nucleic acid and nucleic acids that are “dysfunctional” (i.e., due to a heterologous insertion within the coding sequences of coding sequences to an aforementioned peptide) that are utilized to “knockout” endogenous function of an aforementioned peptide by homologous recombination (see, e.g., Capecchi, 1989. Science 244: 1288-1292); or (v) modulators (i.e., inhibitors, agonists and antagonists, including additional peptide mimetic of the invention or antibodies specific to a peptide of the invention) that alter the interaction between an aforementioned peptide and its binding partner.

[0342] Diseases and disorders that are characterized by decreased (relative to a subject not suffering from the disease or disorder) levels or biological activity may be treated with Therapeutics that increase (i.e., are agonists to) activity. Therapeutics that upregulate activity may be administered in a therapeutic or prophylactic manner. Therapeutics that may be utilized include, but are not limited to, an aforementioned peptide, or analogs, derivatives, fragments or homologs thereof; or an agonist that increases bioavailability.

[0343] Increased or decreased levels can be readily detected by quantifying peptide and/or RNA, by obtaining a patient tissue sample (e.g., from biopsy tissue) and assaying it in vitro for RNA or peptide levels, structure and/or activity of the expressed peptides (or mRNAs of an aforementioned peptide). Methods that are well-known within the art include, but are not limited to, immunoassays (e.g., by Western blot analysis, immunoprecipitation followed by sodium dodecyl sulfate (SDS) polyacrylamide gel electrophoresis, immunocytochemistry, etc.) and/or hybridization assays to detect expression of mRNAs (e.g., Northern assays, dot blots, in situ hybridization, and the like).

[0344] Prophylactic Methods

[0345] In one aspect, the invention provides a method for preventing, in a subject, a disease or condition associated with an aberrant NOVX expression or activity, by administering to the subject an agent that modulates NOVX expression or at least one NOVX activity. Subjects at risk for a disease that is caused or contributed to by aberrant NOVX expression or activity can be identified by, for example, any or a combination of diagnostic or prognostic assays as described herein. Administration of a prophylactic agent can occur prior to the manifestation of symptoms characteristic of the NOVX aberrancy, such that a disease or disorder is prevented or, alternatively, delayed in its progression. Depending upon the type of NOVX aberrancy, for example, a NOVX agonist or NOVX antagonist agent can be used for treating the subject. The appropriate agent can be determined based on screening assays described herein. The prophylactic methods of the invention are further discussed in the following subsections.

[0346] Therapeutic Methods

[0347] Another aspect of the invention pertains to methods of modulating NOVX expression or activity for therapeutic purposes. The modulatory method of the invention involves contacting a cell with an agent that modulates one or more of the activities of NOVX protein activity associated with the cell. An agent that modulates NOVX protein activity can be an agent as described herein, such as a nucleic acid or a protein, a naturally-occurring cognate ligand of a NOVX protein, a peptide, a NOVX peptidomimetic, or other small molecule. In one embodiment, the agent stimulates one or more NOVX protein activity. Examples of such stimulatory agents include active NOVX protein and a nucleic acid molecule encoding NOVX that has been introduced into the cell. In another embodiment, the agent inhibits one or more NOVX protein activity. Examples of such inhibitory agents include antisense NOVX nucleic acid molecules and anti-NOVX antibodies. These modulatory methods can be performed in vitro (e.g., by culturing the cell with the agent) or, alternatively, in vivo (e.g., by administering the agent to a subject). As such, the invention provides methods of treating an individual afflicted with a disease or disorder characterized by aberrant expression or activity of a NOVX protein or nucleic acid molecule. In one embodiment, the method involves administering an agent (e.g., an agent identified by a screening assay described herein), or combination of agents that modulates (e.g., up-regulates or down-regulates) NOVX expression or activity. In another embodiment, the method involves administering a NOVX protein or nucleic acid molecule as therapy to compensate for reduced or aberrant NOVX expression or activity.

[0348] Stimulation of NOVX activity is desirable in situations in which NOVX is abnormally downregulated and/or in which increased NOVX activity is likely to have a beneficial effect. One example of such a situation is where a subject has a disorder characterized by aberrant cell proliferation and/or differentiation (e.g., cancer or immune associated disorders). Another example of such a situation is where the subject has a gestational disease (e.g., preclampsia).

[0349] Determination of the Biological Effect of the Therapeutic

[0350] In various embodiments of the invention, suitable in vitro or in vivo assays are performed to determine the effect of a specific Therapeutic and whether its administration is indicated for treatment of the affected tissue.

[0351] In various specific embodiments, in vitro assays may be performed with representative cells of the type(s) involved in the patient's disorder, to determine if a given Therapeutic exerts the desired effect upon the cell type(s). Compounds for use in therapy may be tested in suitable animal model systems including, but not limited to rats, mice, chicken, cows, monkeys, rabbits, and the like, prior to testing in human subjects. Similarly, for in vivo testing, any of the animal model system known in the art may be used prior to administration to human subjects.

[0352] Prophylactic and Therapeutic Uses of the Compositions of the Invention

[0353] The NOVX nucleic acids and proteins of the invention are useful in potential prophylactic and therapeutic applications implicated in a variety of disorders. The disorders include but are not limited to, e.g., those diseases, disorders and conditions listed above, and more particularly include those diseases, disorders, or conditions associated with homologs of a NOVX protein, such as those summarized in Table A.

[0354] As an example, a cDNA encoding the NOVX protein of the invention may be useful in gene therapy, and the protein may be useful when administered to a subject in need thereof. By way of non-limiting example, the compositions of the invention will have efficacy for treatment of patients suffering from diseases, disorders, conditions and the like, including but not limited to those listed herein.

[0355] Both the novel nucleic acid encoding the NOVX protein, and the NOVX protein of the invention, or fragments thereof, may also be useful in diagnostic applications, wherein the presence or amount of the nucleic acid or the protein are to be assessed. A further use could be as an anti-bacterial molecule (i.e., some peptides have been found to possess anti-bacterial properties). These materials are further useful in the generation of antibodies, which imiunospecifically-bind to the novel substances of the invention for use in therapeutic or diagnostic methods.

[0356] The invention will be further described in the following examples, which do not limit the scope of the invention described in the claims.

### EXAMPLES

### Example A

### Polynucleotide and Polypeptide Sequences, and Homology Data

### Example 1.

[0357] The NOV1 clone was analyzed, and the nucleotide and encoded polypeptide sequences are shown in Table 1A.

TABLE 1A
NOV1 Sequence Analysis

| | SEQ ID NO:1 | 3840 bp | |
|---|---|---|---|
| NOV1a, | GCGCCGCGGCCGGCGATGAGCGCGAGGAGCCGGCATGAGCGCAGACAGCAGCCCTCTCGTGGGCAG | | |
| CG108945-01 | | | |
| DNA Sequence | CACGCCCACCGGTTATGGGACCCTGACGATAGGGACATCAATAGATCCCCTCAGCTCCTCAGTTTC | | |
| | ATCCGTCAGGCTCAGCGGCTACTGTGCAGTCCATGGAGAATCATCAACTATCACGTCGTAATCTG | | |
| | GATGATGGCTGGGATCCCTTTGCTGCTCTTCCGTTAAAAGCCCCTGTGGAAGGTGCGCCTGCGGCT | | |
| | CCGGCCCTGCAACCTGGCCCACGCCGAAACACTCGTTATCGAAATAAGAGACAAAGAGGATAGTTC | | |
| | CTGGCAGCTCTTCACTGTCCAGGTGCAGACTGAGGCCATCAACGGGAACAGCCTGGAGCCGTCCCC | | |
| | ACAGTCCCAGGCAGAGGATGGCCGGAGCCAGGCGGCAGTTGGGGCGGTACCAGAGGGTGCCTGGAA | | |
| | GATACGGGCCCAGCTCCACAAGAGCGAGGAGGCCGTGAGTGTCAAACAGAAGCGAATGCTGCAATA | | |
| | TTACCTCTTCCAGGGCCAGCGCTATATCTAAATCGAGACCCAGCAAGCCTTCTACCAAATCAGCCT | | |
| | CTAAACCATAACCGCTCTTAATGACGACGTCCACCGCTCCCGCCATAACCTCAGCCTCCAAAACCA | | |
| | AATGGTGAGGAAGGCCATTTACGGCCCCAACGTGATCAGCATACCGGTCAAGTCCTACCCCCAGCT | | |
| | GCTGGTGGACGACGCACTGAACCCCTACTATGCGTTCCAGGCCTTCAGCATCGCGCTGTGGCTGGC | | |
| | TGACCACTACTACTGGTACGCCCTGTCCATCTTCCTCATTTCCTCCATCTCCATCTCCCTGTCGCT | | |
| | GTACAAGACCAGAAAGCAAAGCCAGACTCTAAGGGACATGGTCAAGTTGTCCATGCGGGTGTGCGT | | |
| | GTGCCGGCCAGGGGGAAAAGACAGAGTGGTGGACTCCAGTGAGCTAGTGCCCGGAGACTGCCTAAT | | |
| | GCTGCCCCAGGAGGGTGGGCTGATGCCCTGTGATGCCGCCCTGGTGGCCGGCGAGTGCATGGTGAA | | |
| | CTGAGAGCTCTCTGACAGGAGAAAAGCATTCCAGTGCTGAAGACGGCACTGCCAAAGAACTGGGCC | | |
| | CTACTGTGCAAAGACACACCGGCGGCACACACTCTTCTCCGGGACCCTCATCTTGCAGGCCCGGGC | | |
| | CTATGTGGGAGGCAACGCACGTCCTGGCAGTGGTGACCCGCACAGGGTTCTGCACGGCGGAAGCCT | | |
| | GGTGAGCTCCATCTTGCACCCCCGGCCCATCAACTTCAAGTTCTATAAACACAGCATGAAGTTTGT | | |
| | GGCTGCCCTCTCTGTCCTGGGCTCTCCTCGGCACCATCTACAGCATCTTCATCCTCTACCGAACCG | | |
| | GGTGCCTCTGAATGAGATTGTAATCCGGGCTCTCGACCTGGTGACCGTGGTGGTGCCACCTGCCCT | | |
| | GCCTGCTGCCATGACTGTGTGCACGCTCTACGCCCAGAGCCGACTGCGGAGACAGGGCATTTTCTG | | |
| | CATCCACCCACTGCGCATCAACCTGGGGGGCAAGCTGCAGCTGGTGTGTTTCGACAAGACGGGCAC | | |
| | CCTCACTGAGGACGGCTTAGACGTGATGGGGGTGGTGCCCCTGAAGGGGCAGGCATTCCTGCCCCT | | |
| | GGTCCCAGAGCCTCGCCGCCTGCCTGTGGCGCCCCTCCTCCGAGCACTGGCCACCTGCCATGCCCT | | |
| | CAGCCGGCTCCAGGACACCCCCGTGGGCGACCCCATGGACTTGAAGATGGTGGAGTCTACTGGCTG | | |
| | GGTCCTGGAGGAAGAGCCGGCTGCAGACTCAGCATTTGGGACCCAGGTCTTGGCAGTGATGAGACC | | |
| | CCCACTTTCGGAGCCCCAGCTGCAGGCAATGCACGAGCCCCCGGTGCCAGTCAGCGTCCTCCACCG | | |
| | CTTCCCCTTCTCTTCGGCTCTGCAGCGCATGAGTGTGGTGGTAACGTAACCAGAAGCCACTAAGCC | | |
| | CGAGGCCTACGTCAAAGGCTCCCCGGAGCTGGTGGCAGGGCTCTGCAACCCCGAGACAGTGCCCAC | | |
| | CGACTTCGCCCAGATGCTGCAGAGCTATACAGCTGCTAACTACCGTGTCGTAACCCTAACCAGCAA | | |
| | CGCCACTGCCCACTGTGCCCAGCCTGGAGGCAGCCCGCAACTGACGAGGGACACTGTGGAAGGAGA | | |
| | CCTGAGCCTCCTGGGGCTGCTCGTCATGAGGAACCTACTGAAGCCGCAGACAACGCCAGTTATCCA | | |
| | GGCTCTGCGAAGGACCCGCATCCGCGCCGTCATGGTGACAGGGGACAACCTGCAGACAGCAATGAC | | |
| | TGTGGCCCCGGGCTGTGGCATGGTGGCCCCCCAGGAGCATCTGATCATCGTCCACGCCACCCACCC | | |
| | TGAGCGGGGTCAGCCTGCCTCTCTCGAGTTCCTGCCGATGGAGTCCCCCACAGCCGTGAATGGCGT | | |
| | TAAGGATCCTGACCAAACTGCAAGCTACACCGTGGAGCCAGACCCCCGATCAGAACACCTAACCCT | | |
| | CAGCGGGCCCACCTTTGGTATCATTGTGAAGCACTTCCCCAAGCTGCTGCCCAAGGTCCTGGTCCA | | |
| | GGGCACTGTCTTTGCCCGCATGGCCCCTGAGCAGAAGACAGAGCTGGTGTGCGAGCTACAGAAGCT | | |
| | TCAGTACTGGCGTGGGGCATGTGCGGAGACGGCGCCAATGACTGTGAAGCCCTGAACAACTGATGT | | |
| | GGCATCTCGGCTGTCCCAGGCAGAAGCCTCAGTGGTCTCACCCTTCACCTCGAGCATGGCCAGTAT | | |
| | TGAGTCCGTGCCCATGGTCATCAGGCACGGGCGCTGTTCCCTTGACACTTCGTTCAGCCTCTTCAA | | |
| | GTACATGGCTCTGTACAGCCTGACCCAGTTCATCTCCGTCCTGATCCTCTACACGATCAACACCAA | | |
| | CCTGGGTGACCTGCAGTTCCTGGCCATCGACCTGGTCATCACCACCACAGTGGCAGTGCTCATGAG | | |
| | CGAGAAGGCGCCAGCGCTGGTCCTGGGACGGCTGCGGCCACCGGGGGCGCTGCTCAGCGTGCCCGT | | |
| | GCTCAGCAGCCTGCTGCTGCAGATCGTCCTGGTGACCGGCGTGCAGCTACGGGGCTACTTCCTGAC | | |
| | GCTGGGCCCAGCCATGTTCGTGCCTCTGAACAGGACAGTGGCCGCACCAGACAACCTGCCCAACTA | | |
| | CAAGAACACCGTGGTCTTCTCTCTGTCCAGCTTCCAGTACCTCATCCTGGCTGCACCCGTGTCCAA | | |
| | GGGGGCGCCCTTCCGCCGGCCGCTCTACACCAATGTGCCCTTCCTGGTGGCCCTGGCGCTCCTGAG | | |
| | CTCCGTCCTGGTGGGCCTTGTCCTGGTCCCCGGCCTCCTGCAGGGGCCGCTGGCGCTGAGGAACAT | | |
| | CACTGACACCGGCTTCAAGCTGCTGCTGCTGGGTCTGGTCACCCTCAACTTCGTGGGAACCTTCAT | | |
| | GCTGGAGAGCGTGCTAGACCAGTGCCTCCCCGCCTCCCTGCGCCGCCTCCGGCCCAAGCGAACCTC | | |
| | CAAGAAGCGCTTCAAGCAGCTGGAACGAGAGCTGGCCGAGCAGCCCTGGCCGCCGCTGCCCGCCGG | | |
| | CCCCCCTGAGGTAGTGCAGCCCACAAGCACCCCAGACACTGGAACTCCCTGCCTCTGAGCAACCAA | | |
| | CTGGACCCCTCTCCAGCAACACCACCGCCACCACCTCCCACATCCCTGAGGTTGGCGACTGTCTAC | | |
| | ACTCCTCCCCCGAGACCACCCCCACCCTGGGGAAGCGTTGACTACTGTCCCCTACCTTGGACCATC | | |
| | CCGCGTAGGGGTGGCAGCCCCCAGCTCCCCTCAGTGCTGCTGTCAGTGTAGCAAATAAAGTCATGA | | |
| | TATTTTCCTGGC | | |
| | ORF Start: ATG at 35 | | ORF Stop: TAG at 3575 |
| | SEQ ID NO:2 | 1180 aa | MW at 128792.0 kD |
| NOV1a, | MSADSSPLVGSTPTGYGTLTIGTSIDPLSSSVSSVRLSGYCGSPWRVIGYHVWMAAGIPLLLFR | | |
| CG108945-01 | | | |
| Protein Sequence | WKPLWGVRLRLRPCNLAHAETLVIEDKEDSSWQLFTVQVQTEAIGEGSLEPSPQSQAEDGRSQA | | |
| | AVGAVPEGAWKDTAQLHKSEEAVSVCQKRVLRYYLFQGQRYIWIETQQAFYQVSLLDHGRSCDDAA | | |
| | RSRHGLSLQDQMVRKAIYGPNVISIPVKSYPQLLVDEALNPYYGFQAFSIALWLADHYYWYALCIF | | |
| | LISSISICLSLYKTRKQSQTLRDMVKLSMRVCVCRPGGEEEWVDSSELVPGDCLVLPQEAALMPCD | | |
| | AALVAGECMVNESSLTGESIPVLKTALPEGLGPYCAEThRRHTLFCGTLILQARAYVGPHVLAVVT | | |
| | RTGFCTAKGGLVSSILHPRPINFKFYKHSMKFVAALSVLALLGTIYSIFILYRNRVPLNEIVIRAL | | |
| | DLVTVVVPPALPAAMTVCTLYAQSRLRRQGICIHPLRIAALGGKLQLVCFDKTGTLTEDGLDVMGV | | |
| | VPLKGQAFLPLVPEPRRLPVGPLLRALATCHALSRLQDTPVGDPDLKMVESTGWVLEEEPAADASA | | |
| | FGTQVLAVMRPPLWEPQLQANEEPPVPVSVLHRFPFSSALQRMSVVVAWPGATQPEAAAKGSPELV | | |
| | AGLCNPETVPTDFAQMLQSYTAAGYRVVALASKPLPTVPSLEAAQQLTRDTVEGDLSLLGLLVMPN | | |
| | LLKPQTTPVIQALRRTRIRAVMVTGDNLQTAVTVARGCGMXIAPQEHLIIVIIATHRGQPASLEFL | | |
| | PMESPTAVNGVKDPDQAASYTVEPDPRSRHLALSGPTFGIIVKHFPKLLPKVLVQGTVFARMAPEQ | | |
| | KTELVCELQKLQYCVGMCGDGANDCCALKAADVGISLSQAEASVVSPFTSSMASIECVPMVIREGR | | |
| | CSLDTSFSVFKYMALYSLTQFISVLILYTINTNLGDLQFLAIDLVITTTVAVLMSRTGPALVLGRV | | |
| | RPPGALLSVPVLSSLLLQMVLVTGVQLGGYFLTLAQPWFVPLNRTVAAPDILPNYENTVVFSLSSF | | |
| | QYLILAAAVSKGAPFRRPLYTNVPFLVALALLSSVLVGLVLVPGLLQGPLALRNITDTGFKLLLLG | | |
| | LVTLNFVGAFMLESVLDQCLPACLRRLRPKRASKKRFKQLERELAEQPWPPLPAGPLR | | |
| | SEQ ID NO:3 | 3540 bp | |
| NOV1b, | GCGCCGGGGCCGGCGATGAGCGCGAGGAGCCGGCATGAGCGCAGACAGCAGCCCTCTCGTGGGCAG | | |
| CG108945-02 | | | |
| DNA Sequence | CACGCCCACCGGTTATGGGACCCTGACGATAGGGACATCAATAGATCCCCTCAGCTCCTCAGTTTC | | |
| | ATCCGTGACGCTCAGCGGCTACTGTGGCAGTCCATGGAGGGTCATCGGCTATCACGTCGTGGTCTG | | |
| | GATGATGGCTGGGATCCCTTTGCTGCTCTTCCGTTGGAAGCCCCTGTGGGGGGTGCGGCTGCGGCT | | |
| | CCGGCCCTGCAACCTGGCCCACGCCGAAACACTCGTTATCGAAATAAGAGACAAAGACGATAGTTC | | |
| | CTGGCAGCTCTTCACTGTCCAGGTGCAGACTGAGGCCATCGGCGAGGGCAGCCTGGAGCCGTCCCC | | |
| | ACAGTCCCACGCAGAGGATGGCCGGAGCCAGGCGGCAGTTGGGGCGGTACCAGAGGGTGCCTGGAA | | |
| | GGATACGGCCCAGCTCCACAAGAGCGAGGAGGCGGTGAGTGTCGGACAGAAGCGGGTGCTGCGGTA | | |
| | TTACCTCTTCCAGGGCCAGCGCTATATCTGGATCGAGACCCAGCAAGCCTTCTACCAGGTCAGCCT | | |
| | CCTGGACCATGGCCGCTCTTGTGACGACGTCCACCGCTCCCGCCATGGCCTCAGCCTCCAGGACCA | | |
| | AATGGTGAGGAAGGCCATTTACGGCCCCAACGTGATCAGCATACCGGTCAAGTCCTACCCCCAGCT | | |
| | GCTGGTGGACGAGGCACTGAACCCCTACTATGGGTTCCAGGCCTTCAGCATCGCGCTGTGGCTGGC | | |
| | TGACCACTACTACTGGTACGCCCTGTGCATCTTCCTCATTTCCTCCATCTCCATCTGCCTGTCGCT | | |
| | GTACAAGACCAGAAAGCAAAGCCAGACTCTAAGGGACATGGTCAAGTTGTCCATGCGGGTGTGCGT | | |
| | GTGCCGGCCAGGGGGAGAGGAAGAGTGGGTGGACTCCAGTGAGCTAGTGCCCGGAGACTGCCTGGT | | |
| | GCTGCCCCAGGAGGGTGGGCTGATGCCCTGTGATGCCGCCCTGGTGGCCCGCGAGTGCATGGTGAA | | |
| | TGAGAGCTCTCTGACAGGAGAGAGCATTCCAGTGCTGAAGACGGCACTGCCGGAGGGGCTGGGGCC | | |
| | TACTGTGCAGAGACACACCGGCGGCACACACTCTTCTGCGGGACCCTCATCTTGGCAGGCCCGGGC | | |
| | TATGTGGGACCGCACGTCCTGGCAGTGGTGACCCGCACAGGGTTCTGGCACGGCAAAAGGGGCCCT | | |
| | GGTGAGCTCCATCTTGCACCCCCGGCCCATCAACTTCAAGGTTCTATAACACAGCATGAAGTTTGT | | |
| | GGCTGCCCTCTCTGTCCTGGCTCTCCTCGGCACCATCTACAGCATCTTCATCCTCTACCGAAACCG | | |
| | GGTGCCTCTGAATGAGATTGTAATCCGGGCTCTCGACCTGGTGACCGTGGTGGTGCCACCTGCCCT | | |
| | GCCTGCTGCCATGACTGTGTGCACGCTCTACCCCCAGAGCCGACTGCGGAGACAGGGCATTTTCTG | | |
| | CATCCACCCACTGCGCATCAACCTGGGGGGCAAGCTGCAGCTGGTGTGTTTCGACAAGACGGGCAC | | |
| | CCTCACTGAGGACGGCTTAGACGTGATGGGGGTGGTGCCCCTGAAGGGGCAGGCATTCCTGCCCCT | | |
| | GGTCCCAGAGCCTCGCCGCCTGCCTGTGCGGCCCCTGCTCCGAGCACTGGCCACCTGCCATGCCCT | | |
| | ACAACCGGCTCCAGGACACCCCCGTGGGCGACCCCATGGACTTGAGATGGTGGAGTCTACTGGCTG | | |
| | GGTCCTGGAGGAAGAGCCGGCTGCAGACTCAGCATTTGGGACCCAGGTCTTGGCAGTGATGAGACC | | |
| | CCACTTTGGGAGCCCCAGCTGCACCGGAATGGAGGAGCCCCCGGTGCCAGTCAGCGTCCTCCACCG | | |
| | CTTCCCCTTCTCTTCGGCTCTGCAGCGCATGACTGTGGTGGTGGCGTGGCCAGCGGCCACTCAGCC | | |
| | CGAGGCCTACGTCAAAGGCTCCCCGGAGCTGGTCGCAGCGCTCTGCAACCCCGAGACAGTGCCCAC | | |
| | CGACTTCGCCCAGATGCTGCAGAGCTATACAGCTGCTGGCTACCGTGTCGTGGCCCTGGCCAGCAA | | |
| | GCCACTGCCCACTGTGCCCAGCCTGGAGGCAGCCCAGCAACTGACGAGGGACACTGTGGAAGGAGA | | |
| | CCTGAGCCTCCTGGGGCTGCTGGTCATGAGGAACCTACTGAAGCCGCACACAACGCCAGTTATCCA | | |
| | GGCTCTGCGAAGGACCCGCATCCGCGCCGTCATCGTGACAGGGGACAACCTGCAGACAGCGGTGAC | | |
| | TGTGGCCCGGGGCTGTCGCATCGTGGCCCCCCAGGAGCATCTGATCATCGTCCACGCCACCCACCC | | |
| | TGAGCGGGGTCAGCCTGCCTCTCTCGAGTTCCTGCCGATGGAGTCCCCCACAGCCGTGAATGGCGT | | |
| | TAAGGTCCTCGTCCAGGGCACTGTCTTTGCCCGCATGGCCCCTGAGCAGAAGACAGAGCTGGTGTG | | |
| | CGAGCTACAGAAGCTTCAGTACTGCGTGGGCATGTGCGGAGACGGTGCCAATGACTGTGGGGCCCT | | |
| | GAAGGCGGCTGATGTCGGCATCTCGCTGTCCCAGGCAGAAGCCTCAGTGGTCTCACCCTTCACCTC | | |
| | GAGCATGGCCAGTATTGAGTGCGTGCCCATGGTCATCAGGGAGGGGCGCTGTTCCCTTGACACTTC | | |
| | GTTCAGCGTCTTCAAGTACATGGCTCTGTACAGCCTGACCCAGTTCATCTCCGTCCTGATCCTCTA | | |
| | CACGATCAACACCAACCTGGGTGACCTGCAGTTCCTGGCCATCGACCTGGTCATCACCACCACAGT | | |
| | GGCAGTGCTCATCAGCCCCACGGGGCCAGCGCTGGTCCTCGGACCGGTGCGGCCACCCGGGGCGCT | | |
| | GCTCAGCGTGCCCGTGCTCAGCAGCCTGCTGCTGCAGATCGTCCTGGTGACCGGCGTGCAGCTAGG | | |
| | GGGCTACTTCCTGACCCTGGCCCACCCATGGTTCGTGCCTCTGAACAGGACAGTGGCCGCACCAGA | | |
| | CAACCTGCCCAACTACGAGAACACCGTGGTCTTCTCTCTGTCCAGCTTCCAGTACCTCATCCTGGC | | |
| | TGCAGCCGTGTCCAAGGGGGCGCCCTTCCGCCGGCCGCTCTACACCAATGAGCGTGCTAGACCAGT | | |
| | CCCTCCCCGCCTGCCTGCGCCGCCTCCGGCCCAAGCGGGCCTCCAAGAAGCGCTTCAAGCAGCTGG | | |
| | AACGAGAGCTGGCCGAGCAGCCCTGGCCGCCGCTGCCCGCCGGCCCCCTGAGGTAGTGCAGGCCCA | | |
| | CGGGCACCCCAGACACTGGAACTCCCTGCCTCTGAGCCACCAACTGGACCCCTCTCCAGCAACACC | | |
| | ACCGCCACCACCTCCCACATCCCTGAGGTTGGCGACTGTCTACACTCCTCCCCCGAGACCACCCCC | | |
| | ACCCTGGGGAAGCGTTGACTACTGTCCCCTACCTTGGACCATCCCGCGTAGGGGTGGCAGCCCCCA | | |
| | GCTCCCCTCAGTGCTGCTGTCAGTGTAGCAAATAAAGTCATG | | |
| | ORF Start: ATG at 35 | | ORF Stop:TAG at 3524 |
| | SEQ ID NO:4 | 1163 aa | MW at 126445.6 kD |

| | |
|---|---|
| NOV1b, | MSADSSPLVGSTPTGYGTLTIGTSIDPLSSSVSSVRLSGYCGSPWRVIGYHVVVWMMAGIPLLLFR |
| CG108945-02 | |
| Protein Sequence | WKPLWOVRLRLRPCNLAHAETLVIEIRDKEDSSWQLFTVQVQTEAIGEGSLAAPSPQSAEDGRSQA |
| | AVGAVPEGAWKDTAQLHKSEEAVSVGQKRVLRYYLFQGQRYIWIETQQAFYQVSLLDHGRSCDDVH |
| | RSRHGLSLQDQMVRKAIYGPNVISIPVKSYPQLLVDEALNPYYGFQAFSIALWLADEYYWYALCIF |
| | LISSISICLSLYKTRKQSQTLRDMVKLSMRVCVCRPGGEEEWVDSSELVPGDCLVLPQEGGLMPCD |
| | AALVAGECMVNESSLTGESIPVLKTALPEGLGPYCAETIHRRIHTLFCGTLILQAYVGPHVLAVVT |
| | RTGFCTAKGGLVSSILHPRPINFKFYKHSMKFVAALSVLALLGTIYSIFILRYYRVPLNEIVIRAL |
| | DLVTVVVPPALPAAMTVCTLYAQSRLRRQGIFCIHPLRINLGGKLQLVCFDKTGTLTEDGLDVMGV |
| | VPLKGQAFLPLVPEPRRLPVGPLLRALATCHALSRLQDTPVGDPMDLKNVESTGWVLEEEPAADSA |
| | FGTQVLAVMRPPLWEPQLQAMEEPPVPVSVLHRFPFSSALQRMSVVVAWPGATQPEAYVKGSPELV |
| | AGLCNPETVPTDFAQMLQSYTAAGYRVVALASKPLPTVPSLEAAQQLTRDTVEGDLSLLGLLVMRN |
| | LLKPQTTPVIQALRRTRIRAVMVTGDNLQTAVTVARGCGMVAPQEHLIIVHATHPERGQPASLEFL |
| | PMESPTAVUGVKVLVQGTVFAAMAPEQKTELVCELQKLQYCVGMCGDGANACGALKAADVGISLSQ |
| | AEASVVSPFTSSMASIECVPMVIREGRCSLDTSFSVFKYMALYSLTQFISVLILYTINTNLGDLQF |
| | LAIDLVITTTVAVLMSRTGPLVLGRVRPPGALLSVPVLSSLLLQMVLVTGVQLGGYFFLTLAQPWF |
| | VPLNRTVAAPDMLPNYENTVVFSLSSFQYLILAAAVSKQAPFRRPLYTNERARPVPPRLPAPPPAQ |
| | AGLQEALQAAGTRAGRAALAAAARRPPEVVQAHGHPRHWNSLPLSHQLDPSPATPPPPPPTSLRLA |
| | TVYTPPPRPPPPWGSVDYCPLPWTIPRRGGSPQLPSVLLSV |

[0358] Sequence comparison of the above protein sequences yields the following sequence relationships shown in Table 1B.

TABLE 1B
Comparison of NOV1a against NOV1b.

| | NOV1a | Identities/ |
|---|---|---|
| | Residues/ | Similarities |
| Protein | Match | for the |
| Sequence | Residues | Matched Region |
| NOV1b | 1 . . . 1078 | 1039/1078 (96%) |
| | 1 . . . 1039 | 1039/1078 (96%) |

[0359] Further analysis of the NOV1a protein yielded the following properties shown in Table 1C.

TABLE 1C
Protein Sequence Properties NOV1a

| SignalP | Cleavage site between residues 12 and 13 | | | | |
|---|---|---|---|---|---|
| analysis: | | | | | |
| PSORT II | PSG: a new signal peptide prediction method | | | | |
| analysis: | N-region: length 4; pos. chg 0; neg. chg 1 | | | | |
| | H-region: length 21; peak value 0.00 | | | | |
| | PSG score: −4.40 | | | | |
| | GvH: von Heijne's method for signal seq. recognition | | | | |
| | GvH score (threshold: −2.1): −7.09 | | | | |
| | possible cleavage site: between 31 and 32 | | | | |
| | >>> Seems to have no N-terminal signal peptide | | | | |
| | ALOM: Klein et al's method for TM region allocation | | | | |
| | Init position for calculation: 1 | | | | |
| | Tentative number of TMS(s) for the threshold 0.5: 10 | | | | |
| | INTEGRAL | Likelihood = | −2.28 | Transmembrane | 47-63 |
| | INTEGRAL | Likelihood = | −6.05 | Transmembrane | 259-275 |
| | INTEGRAL | Likelihood = | −6.48 | Transmembrane | 431-447 |
| | INTEGRAL | Likelihood = | −3.29 | Transmembrane | 457-473 |
| | INTEGRAL | Likelihood = | −0.80 | Transmembrane | 938-954 |
| | INTEGRAL | Likelihood = | −4.25 | Transmembrane | 963-979 |
| | INTEGRAL | Likelihood = | −5.79 | Transmembrane | 996-1012 |
| | INTEGRAL | Likelihood = | −2.87 | Transmembrane | 1049-1065 |
| | INTEGRAL | Likelihood = | −11.83 | Transmembrane | 1082-1098 |
| | INTEGRAL | Likelihood = | −6.58 | Transmembrane | 1118-1134 |
| | PERIPHERAL | Likelihood = | 1.75 | (at 379) | |
| | ALOM score: −11.83 (number of TMSs: 10) | | | | |
| | MTOP: Prediction of membrane topology (Hartmann et al.) | | | | |
| | Center position for calculation: 54 | | | | |
| | Charge difference: 3.5 C(5.0)-N(1.5) | | | | |
| | C > N: C-terminal side will be inside | | | | |
| | >>> membrane topology: type 3b | | | | |
| | MITDISC: discrimination of mitochondrial targeting seq | | | | |
| | R content: | 0 | Hyd Moment (75): | 5.53 | |
| | Hyd Moment (95): | 4.13 | G content: | 4 | |
| | D/E content: | 2 | S/T content: | 10 | |

Score: −6.25
Gavel: prediction of cleavage sites for mitochondrial preseq
R-2 motif at 88 LRP|CN
NUCDISC: discrimination of nuclear localization signals
pat4: RPKR (4) at 1150
pat7: none
bipartite: none
content of basic residues: 8.6%
NLS Score: −0.22
KDEL: ER retention motif in the C-terminus: none
ER Membrane Retention Signals: none
SKL: peroxisomal targeting signal in the C-terminus: none
PTS2: 2nd peroxisomal targeting signal: none
VAC: possible vacuolar targeting motif: none
RNA-binding motif: none
Actinin-type actin-binding motif:
type 1: none
type 2: none
NMYR: N-myristoylation pattern: none
Prenylation motif: none
memYQRL: transport motif from cell surface to Golgi: none
Tyrosines in the tail: none
Dileucine motif in the tail: none
checking 63 PROSITE DNA binding motifs: none
checking 71 PROSITE ribosomal protein motifs: none
checking 33 PROSITE prokaryotic DNA binding motifs: none
NNCN: Reinhardt's method for Cytoplasmic/Nuclear
discrimination
Prediction: cytoplasmic
Reliability: 94.1
COIL: Lupas's algorithm to detect coiled-coil regions
total: 0 residues
Final Results (k = 9/23):
66.7%: endoplasmic reticulum
11.1%: mitochondrial
11.1%: vesicles of secretory system
11.1%: vacuolar
>> prediction for CG108945-01 is end (k = 9)

[0360] A search of the NOV1a protein against the Geneseq database, a proprietary database that contains sequences published in patents and patent publication, yielded several homologous proteins shown in Table 1D.

TABLE 1D
Geneseq Results for NOV1a

| | | NOV1a | Identities/ | |
|---|---|---|---|---|
| | | Residues/ | Similarities | |
| Geneseq | Protein/Organism/Length | Match | for the | Expect |
| Identifier | [Patent #, Date] | Residues | Matched Region | Value |
| AAU91183 | Human HEAT-1 polypeptide - | 1 . . . 1180 | 1180/1180 (100%) | 0.0 |
| | Homo sapiens, 1180 aa. | 1 . . . 1180 | 1180/1180 (100%) | |
| | [WO200216591-A2, 28 FEB. 2002] | | | |
| AAM93906 | Human polypeptide, SEQ ID NO: | 339 . . . 1180 | 841/842 (99%) | 0.0 |
| | 4053 - Homo sapiens, 842 aa. | 1 . . . 842 | 841/842 (99%) | |
| | [EP1130094-A2, 05 SEP. 2001] | | | |
| AAM79751 | Human protein SEQ ID NO 3397 - | 515 . . . 1180 | 633/666 (95%) | 0.0 |
| | Homo sapiens, 666 aa. | 1 . . . 666 | 637/666 (95%) | |
| | [WO200157190-A2, | | | |
| | 09 AUG. 2001] | | | |
| ABB11769 | Human dJ37C10.3 ATPase | 515 . . . 1180 | 633/666 (95%) | 0.0 |
| | homologue, SEQ ID NO: 2139 - | 1 . . . 666 | 637/666 (95%) | |
| | Homo sapiens, 666 aa. | | | |
| | [WO200157188-A2, | | | |
| | 09 AUG. 2001] | | | |
| AAM78767 | Human protein SEQ ID NO 1429 - | 603 . . . 1078 | 476/476 (100%) | 0.0 |
| | Homo sapiens, 600 aa. | 1 . . . 476 | 476/476 (100%) | |
| | [WO200157190-A2, | | | |
| | 09 AUG. 2001] | | | |

[0361] In a BLAST search of public sequence databases, the NOV1a protein was found to have homology to the proteins shown in the BLASTP data in Table 1E.

TABLE 1E
Public BLASTP Results for NOV1a

| | | NOV1a | Identities/ | |
|---|---|---|---|---|
| Protein | | Residues/ | Similarities | |
| Accession | | Match | for the | Expect |
| Number | Protein/Organism/Length | Residues | Matched Portion | Value |
| Q9NQ11 | Probable cation-transporting | 1 . . . 1180 | 1180/1180 (100%) | 0.0 |
| | ATPase 1 (EC 3.6.1.-) - Homo | 1 . . . 1180 | 1180/1180 (100%) | |
| | sapiens (Human), 1180 aa. | | | |
| Q8N4D4 | Putative ATPase - Homo sapiens | 93 . . . 1180 | 1088/1088 (100%) | 0.0 |
| | (Human), 1088 aa (fragment). | 1 . . . 1088 | 1088/1088 (100%) | |
| AAH30267 | Similar to putative ATPase - | 1 . . . 1078 | 1033/1078 (95%) | 0.0 |
| | Homo sapiens (Human), 1158 aa. | 1 . . . 1034 | 1034/1078 (95%) | |
| Q8NBS1 | Hypothetical protein FLJ90829 - | 339 . . . 1180 | 841/842 (99%) | 0.0 |
| | Homo sapiens (Human), 842 aa. | 1 . . . 842 | 841/842 (99%) | |
| AAH23746 | Similar to putative ATPase - Mus | 9 . . . 613 | 520/605 (85%) | 0.0 |
| | musculus (Mouse), 650 aa. | 1 . . . 600 | 550/605 (89%) | |

[0362] PFam analysis predicts that the NOV1a protein contains the domains shown in the Table 1F.

TABLE 1F
Domain Analysis of NOV1a

| | | Identities/ | |
|---|---|---|---|
| | | Similarities | |
| | NOV1a Match | for the | Expect |
| Pfam Domain | Region | Matched Region | Value |
| E1-E2_ATPase | 299 . . . 387 | 33/94 (35%) | 1.4e-14 |
| | | 74/94 (79%) | |
| Hydrolase | 507 . . . 899 | 45/399 (11%) | 0.00041 |
| | | 224/399 (56%) | |

### Example 2.

[0363] The NOV2 clone was analyzed, and the nucleotide and encoded polypeptide sequences are shown in Table 2A.

TABLE 2A
NOV2 Sequence Analysis

| | SEQ ID NO:5 | 728 bp | |
|---|---|---|---|
| NOV2a, | CTTCCAACTCGCCCCGCTCGGTCACCCGCAGCAAGGCGTGCAGTTTCCCAACTCTCTGCGCAACCG | | |
| CG112559-03 | | | |
| DNA Sequence | GGGAAGGTCAGCGCCGTAATGGCGTTCTTCGCGTCGGGACCCTACCTGACCCATCAGCAAAAGGTG | | |
| | TTGCGGCTTTATAAGCGGGCGCTACGCCACCTCGAGTCGTGGTGCGTCCAGAGAGACAAATACCGA | | |
| | TACTTTGCTTGTTTGATGAGAGCCCGGTTTGAAGAACATAAGAATGAAAAGGATATAACGAAGGCC | | |
| | ACCCAGCTGCTGAAGGAGGCCGAGGAAGAATTCTGGTACCGTCAGCATCCACAGCCATACATCTTC | | |
| | CCTGACTCTCCTGGGGGCACCTCCTATGAGAGATACGATTGCTACAAGGTCCCAGAATGGTGCTTA | | |
| | CCGATGACTGCATCCTTCTGAGAAGGcATGTATCCTGATTACTTTGCCAAGAGAGAACAGTGGAAG | | |
| | AAACTGCGGAGGGAAAGCTGGGAACGAGAGGTTAAGCAGCTGCAGGAGGAAACGCCACCTGGTGGT | | |
| | CTTTAACTGAAGCTTTGCCCCCTGCCCGAAAGGAAGGTGATTTGCCCCCACTGTGGTGGGGATATT | | |
| | GTGACCAGACCCCGGGAGGCGGCCCATGTAGAAGAGAGAGACCTCATCTTTAATGCTTGCAAGTGA | | |
| | AATATGTTACAGAACATGCACTTGCCCTAATAAAAAAATCAGTGAAATGGTCAAAAAAAAAAAAAA | | |
| | AA | | |
| | ORF Start: ATG at 85 | | ORF Stop: TAG at 622 |
| | SEQ ID NO:6 | 179 aa | MW at 21830.7 kD |

| | | |
|---|---|---|
| NOV2a, | MAFLASGPYLTHQQKVLRLYKRALRHLESWCVQRDKYRYFACLMPARFEEHKNEKDMAKATQLLKE | |
| CG112559-03 | | |
| Protein Sequence | AEEEFWYRQHLPQPYIPDSPGGTSYERYDCYRVPEWCLDDWHPSEKAMYPDYFAKREQWKKLRRES | |
| | WEREVKQLQEETPPGGPLTEALPPARKEGDLPPLWWYIVTRPRERPM | |
| | SEQ ID NO:7 | 510 bp |
| NOV2b, | GGCAGAGCCCCGCTCAGTCACCCGCAGCAGGCGTGCAGTTTCCCGGCTCTCCGCGCGGCCGGGGAA | |
| CG112559-03 | | |
| Protein Sequence | GGTCAGCGCCGTAATGGCGTTCTTGGCGTCGGGACCCTACCTGACCCATCACCAAAAGGTGTTGCG | |
| | GCTTTATAAGCGGGCGCTACGCCACCTCGAGTCGTGGTGCGTCCAGAGAGACAAATACCGATACTT | |
| | TGCTTGTTTGATGAGAGCCCGGTTTGAAGAAACTGCGGAGGGAAAGCTCGGAACGAGAGGTTAAGC | |
| | AGCTGCAGGAGGAAACGCCACCTGGTGGTCCTTTAACTGAAGCTTTCCCCCCTGCCCGAAAGGAAG | |
| | GTGATTTGCCCCCACTGTGGTGGTATATTGTGACCAGACCCCGGGAGCGGCCCATGTAGAAAGAGA | |
| | GAGACCTCATCTTTCATGCTTGCAAGTGAAATATGTTACAGAACATGCACTTGCCCTAATAAAAAA | |
| | TCAGTGAAATGGAAAAAAAAAAAAAAAAAAAAAAAAAAAAAAAAAAAA | |

| | ORF Start: ATG at 80 | | ORF Stop: TAA at 260 |
|---|---|---|---|
| | SEQ ID NO:8 | 60 aa | MW at 7152.3 kD |
| NOV2b, | MAFLASGPYLTHQQKVLPWYKRALRHLESWCVQRDKYRYFACLMRARFEETAEGKLGTRG | | |
| CG1125 59-02 | | | |
| Protein Sequence | | | |
| | SEQ ID NO:9 | 728 bp | |
| NOV2c, | CTTCCGGCTGGCCCCGCTCGGTCACCCGCAGCAGGCGTGCAGTTTCCCGGCTCTCTGCGCGGCCG | | |
| CG112559-01 | | | |
| DNA Sequence | GGGAAGGTCAGCGCCGTAATGGCGTTCTTGGCGTCGGGACCCTACCTGACCCATCAGCAAAAGGTG | | |
| | TTGCGGCTTTATAAGCGGGCGCTACGCCACCTCGAGTCGTGGTGCGTCCAGAGAGACAAATACCGA | | |
| | TACTTTGCTTGTTTGATGAGAGCCCGGTTTGAAGAACATAAGAATGAAAAGGATATGGCGAAGGCC | | |
| | ACCCAGCTGCTGAAGGAGGCCGAGGAAGAATTCTGGTACCGTCAGCATCCACAGCCATACATCTTC | | |
| | CCTGACTCTCCTGGGGCACCTCCTATGAGAGATACGATTGCTACAAGAATCCCAGAATAATGCTTA | | |
| | GATGACTGGCATCCTTCTGAGAAGGCAATGTATCCTGATTACTTTGCCAAGAGAGAACAGTCGAAG | | |
| | AAACTCCGGAGGGAAAGCTGGGAACGAGAGGTTAAGCAGCTGCAGGAGGAAACGCCACCTGGTCGT | | |
| | CCTTTAACTGAAGCTTTGCCCCCTGCCCGAAAGGAAGGTGATTTGCCCCCACTGTGGTGGTATATT | | |
| | GTGACCAGACCCCCGGAGCGGCCCATGTAGAAAGAGAGAGACCTCATCTTTCATGCTTGCAAGTGA | | |
| | AATATGTTACAGAACATGCACTTGCCCTAATAAAAAATCAGTGAAATGGTCAAAAAAAAAAAAAAA | | |
| | AA | | |
| | ORF Start: ATG at 85 | | ORF Stop: TAG at 622 |
| | SEQ ID NO:10 | 179 aa | MW at 21830.7 kD |

| | |
|---|---|
| NOV2c, | MAFLASGPYLTHQQKVLRLYKRALRHLESWCVQRDKYRYFACLMRARFEEHKWEKDMAKATQLLKE |
| CG112559-01 | |
| Protein Sequence | AEEEFWYRQHPQPYIFPDSPGGTSYERYDCYKVPEWCLDDWHPSEKAMYPDYFAKREQWKKLRRES |
| | WEREVKQLQEETPPCGPLTEALPPARKEGDLPPLWWYIVTRPRERPM |

[0364] Sequence comparison of the above protein sequences yields the following sequence relationships shown in Table 2B.

TABLE 2B
Comparison of NOV2a against NOV2b and NOV2c.

| | NOV2a | Identities/ |
|---|---|---|
| | Residues/ | Similarities |
| Protein | Match | for the |
| Sequence | Residues | Matched Region |
| NOV2b | 1 . . . 50 | 50/50 (100%) |
| | 1 . . . 50 | 50/50 (100%) |
| NOV2c | 1 . . . 179 | 179/179 (100%) |
| | 1 . . . 179 | 179/179 (100%) |

[0365] Further analysis of the NOV2a protein yielded the following properties shown in Table 2C.

TABLE 2C
Protein Sequence Properties NOV2a

| SignalP | No Known Signal Sequence Predicted | | | |
|---|---|---|---|---|
| analysis: | | | | |
| PSORT II | PSG: a new signal peptide prediction method | | | |
| analysis: | N-region: length 0; pos. chg 0; neg. chg 0 | | | |
| | H-region: length 14; peak value 7.59 | | | |
| | PSG score: 3.19 | | | |
| | GvH: von Heijne's method for signal seq. recognition | | | |
| | GvH score (threshold: −2.1): −6.98 | | | |
| | possible cleavage site: between 13 and 14 | | | |
| | >>> Seems to have no N-terminal signal peptide | | | |
| | ALOM: Klein et al's method for TM region allocation | | | |
| | Init position for calculation: 1 | | | |
| | Tentative number of TMS(s) for the threshold 0.5: 0 | | | |
| | number of TMS(s) . . . fixed | | | |
| | PERIPHERAL Likelihood = 11.62 (at 1) | | | |
| | ALOM score: 11.62 (number of TMSs: 0) | | | |
| | MTOP: Prediction of membrane topology (Hartmann et al.) | | | |
| | Center position for calculation: 6 | | | |
| | Charge difference: 5.0 C(6.0)-N(1.0) | | | |
| | C > N: C-terminal side will be inside | | | |
| | >>>Caution: Inconsistent mtop result with signal peptide | | | |
| | MITDISC: discrimination of mitochondrial targeting seq | | | |
| | R content: | 3 | Hyd Moment (75): | 0.61 |
| | Hyd Moment (95): | 0.61 | G content: | 1 |
| | D/E content: | 1 | S/T content: | 2 |

```
Score: −3.54
Gavel: prediction of cleavage sites for mitochondrial preseq
R-2 motif at 35 LRH|LE
NUCDISC: discrimination of nuclear localization signals
pat4: none
pat7: none
bipartite: none
content of basic residues: 17.3%
NLS Score: −0.47
KDEL: ER retention motif in the C-terminus: none
ER Membrane Retention Signals: none
SKL: peroxisomal targeting signal in the C-terminus: none
PTS2: 2nd peroxisomal targeting signal: none
VAC: possible vacuolar targeting motif: none
RNA-binding motif: none
Actinin-type actin-binding motif:
type 1: none
type 2: none
NMYR: N-myristoylation pattern: none
Prenylation motif: none
memYQRL: transport motif from cell surface to Golgi: none
Tyrosines in the tail: none
Dileucine motif in the tail: none
checking 63 PROSITE DNA binding motifs: none
checking 71 PROSITE ribosomal protein motifs: none
checking 33 PROSITE prokaryotic DNA binding motifs: none
NNCN: Reinhardt's method for Cytoplasmic/Nuclear
discrimination
Prediction: nuclear
Reliability: 55.5
COIL: Lupas's algorithm to detect coiled-coil regions
total: 0 residues
Final Results (k = 9/23):
43.5%: mitochondrial
43.5%: nuclear
  8.7%: cytoplasmic
  4.3%: peroxisomal
>> prediction for CG112559-03 is mit (k = 23)
```

[0366] A search of the NOV2a protein against the Geneseq database, a proprietary database that contains sequences published in patents and patent publication, yielded several homologous proteins shown in Table 2D.

TABLE 2D
Geneseq Results for NOV2a

| | | NOV2a | Identities/ | |
|---|---|---|---|---|
| | | Residues/ | Similarities | |
| Geneseq | Protein/Organism/Length | Match | for the | Expect |
| Identifier | [Patent #, Date] | Residues | Matched Region | Value |
| ABP41219 | Human ovarian antigen HVCAH21, | 1 . . . 179 | 179/179 (100%) | e−110 |
| | SEQ ID NO: 2351 - Homo sapiens, | 27 . . . 205 | 179/179 (100%) | |
| | 205 aa. [WO200200677-A1, | | | |
| | 03 JAN. 2002] | | | |
| AAY32426 | Ubiquinone oxidoreductase subunit | 1 . . . 179 | 179/179 (100%) | e−110 |
| | CI-B22 homologue CBNAFA09 - | 1 . . . 179 | 179/179 (100%) | |
| | Homo sapiens, 179 aa. | | | |
| | [WO9962948-A1, 09 DEC. 1999] | | | |
| AAY66190 | Human bladder tumour EST encoded | 1 . . . 179 | 179/179 (100%) | e−110 |
| | protein 48 - Homo sapiens, 206 aa. | 28 . . . 206 | 179/179 (100%) | |
| | [DE19818619-A1, 28 OCT. 1999] | | | |
| AAY76558 | Human ovarian tumor EST fragment | 10 . . . 179 | 168/170 (98%) | e−104 |
| | encoded protein 54 - Homo sapiens, | 5 . . . 174 | 169/170 (98%) | |
| | 174 aa. [DE19817557-A1, | | | |
| | 21 OCT. 1999] | | | |
| ABG23808 | Novel human diagnostic protein | 1 . . . 179 | 165/182 (90%) | 5e−97 |
| | #23799 - Homo sapiens, 234 aa. | 30 . . . 211 | 169/182 (92%) | |
| | [WO200175067-A2, 11 OCT. 2001] | | | |

[0367] In a BLAST search of public sequence databases, the NOV2a protein was found to have homology to the proteins shown in the BLASTP data in Table 2E.

TABLE 2E
Public BLASTP Results for NOV2a

| | | NOV2a | Identities/ | |
|---|---|---|---|---|
| Protein | | Residues/ | Similarities | |
| Accession | | Match | for the | Expect |
| Number | Protein/Organism/Length | Residues | Matched Portion | Value |
| Q9Y6M9 | NADH-ubiquinone oxidoreductase | 2 . . . 179 | 178/178 (100%) | e−109 |
| | B22 subunit (EC 1.6.5.3) (EC | 1 . . . 178 | 178/178 (100%) | |
| | 1.6.99.3) (Complex I-B22) (CI-B22) - | | | |
| | Homo sapiens (Human), 178 aa. | | | |
| Q9UQE8 | NADH-ubiquinone oxidoreductase | 1 . . . 179 | 178/179 (99%) | e−109 |
| | B22 subunit homolog - | 1 . . . 179 | 178/179 (99%) | |
| | Homo sapiens | | | |
| | (Human), 179 aa. | | | |
| S28256 | NADH dehydrogenase (ubiquinone) | 1 . . . 179 | 163/179 (91%) | e−101 |
| | (EC 1.6.5.3) chain CI-B22 - bovine, | 1 . . . 179 | 173/179 (96%) | |
| | 179 aa. | | | |
| Q02369 | NADH-ubiquinone oxidoreductase | 2 . . . 179 | 162/178 (91%) | e−101 |
| | B22 subunit (EC 1.6.5.3) | 1 . . . 178 | 172/178 (96%) | |
| | (EC 1.6.99.3) (Complex I-B22) | | | |
| | (CI-B22) - | | | |
| | Bos taurus (Bovine), 178 aa. | | | |
| Q9CQJ8 | 1190008J14Rik protein (NADH | 1 . . . 178 | 155/178 (87%) | 2e−95 |
| | dehydrogenase (Ubiquinone) | 1 . . . 178 | 165/178 (92%) | |
| | 1 beta subcomplex, 9) - | | | |
| | Mus musculus | | | |
| | (Mouse), 179 aa. | | | |

[0368] PFam analysis predicts that the NOV2a protein contains the domains shown in the Table 2F.

TABLE 2F
Domain Analysis of NOV2a

| | | | |
|---|---|---|---|
| Pfam | NOV2a | Identities/Similarities | Expect |
| Domain | Match Region | for the Matched Region | Value |

### Example 3.

[0369] The NOV3 clone was analyzed, and the nucleotide and encoded polypeptide sequences are shown in Table 3A.

TABLE 3A
NOV3 Sequence Analysis

| | SEQ ID NO:11 | 853 bp | |
|---|---|---|---|
| NOV3a, | GTCGGTAGTAGCGATGGCGGGTCTGACTGACTTGCAGCGGCTACAGGCCCGAGTGGAAGAGCTGGA | | |
| CG115757-01 | | | |
| DNA Sequence | GCGCTGGGTGTACGGGCCGGGCGGGGCGCGCGGCTCACGCAAGGTGGCTGACGGCCTGGTCAAGGT | | |
| | GCAGGTGGCTTTGGGAACATTTCCAGCAAGAGGGAGAGGGTGAAAGATTCTCTACAAAAAGATTGA | | |
| | AGATCTGATCAAGTACCTGGATCCTGAGTACATCGACCGCATTGCCATACCTGATGCCTCTAAGCT | | |
| | GCATTCATCCTAGCAGAGGAGCAGTTTATCCTTTCCCAGGTTGCACTCCTGGAGCAGAATGAATGC | | |
| | TTGGTGCCCATGCTGGACAGTGCTCACATCAAAGCCGTTCCTGAGCATGCTGCCCGGCCTGCAGCG | | |
| | TTGGCCCAGATCCACATTCAGCAGCAGCACCAGTGTGTGGAAATCACTGAGGAGTCCAAAGGCTCT | | |
| | CTGGAGGAATACAACAAGACTACAATGCTTCTCTCCAAGCAATTCGTGCAGTGGGATGGAGCTACT | | |
| | TTGCCAGCTAGAGGCCGCCACGCAAGTGAAGCCAGCAGAGGAGTGATAGCTGCTCCCCAATCCCAA | | |
| | GTGGGCCTGGGCAGTCAGGCTCCAAAGCCCTATGCCAACCTGCCTTTGTTACAAGGCAGAGGAAGC | | |
| | TTTGTATTTATTGGCTTCAAGAACCACCTCTCTGTACTCTGGGCTCTAAAGTTGGAGGTCAGGTTA | | |
| | CCTGAGTTTGCAATTTGCAACACCCACCCTCCCCCCAAAACAGTGTTCTTATTTCAGTGACAATAA | | |
| | ACCATAGAGATGACTGGAAAAAAAAAAAAAAAAAAAAAAAAAAAAAAAAAAAAAAAAAAAA | | |
| | ORF Start: ATG at 14 | | ORF Stop: TGA at 572 |
| | SEQ ID NO:12 | 186 aa | MW at 21119.2 kD |
| NOV3a, | MAGLTDLQRLQARVEELERNVYGPGGARGSRKVADGLVKVQVALGNISSKRERVKILYKKIEDLIIC | | |
| CG115757-01 | | | |
| Protein Sequence | YLDPEYIDRIAIPDASKLQFILAEEQFILSQVALLEQVNALVPMLDSAHIKAVPEHAARLQRLAQI | | |
| | HIQQQDQCVEITEESKAILLEEYMKTTMLLSKQFVQWDELLCQLEAATQVKPAEE | | |
| | SEQ ID NO:13 | 540 bp | |
| NOV3b, | GTCGGTAGTAGCGATGGCGGGTCTGACTGACTTGCAGCCGCTACAGGCCCGAGTGGAAGAGCTGGA | | |
| CG115757-02 | | | |
| DNA Sequence | GCGCTGGGTGTACCGGCCGGGCGGGGCGCGCGGCTCACGGAAGGTGGCTGACGGCCTGGTCAAGGT | | |
| | GCAGGTGGCTTTGCGGAACATTTCCAGCAAGAGGGAGAGGGTGAAGATTCTCTACAAAAAGATTGA | | |
| | AGATCTGATCAAGTACCTGGATCCTGAGTACATCGACCGCATTGCCATACCTGATGCCTCTAAGCT | | |
| | GCAATTCATCCTAGCAGCCGTTCCTGAGCATGCTGCCCGCCTGCAGCGCTTGGCCCAGATCCAAAT | | |
| | TCAGCAGCAGCACCAGTGTGTGGAAATCACTGAGGAGTCCAAGGCTCTCCTGGAGGAATACAACAA | | |
| | GACTACAATGCTTCTCTCCAAGCAATTCGTGCAGTGGGATGAGCTACTTTGCCAGCTAGAGGCCGC | | |
| | CACGCAAGTGAAGCCAGCAGAGGAGTGATAGCTGCTCCCCATCCCAAAGTGGGCCTGGGCAGTCAG | | |
| | GCTCCAGGGCCC | | |
| | ORF Start: ATG at 14 | | ORF Stop: TGA at 488 |
| | SEQ ID NO:14 | 158 aa | MW at 18000.6 kD |

| | |
|---|---|
| NOV3b, | MAGLTDLQRLQARVEELERWVYGPGGARGSRKVADGLVKVQVALGNISSKRERVKILYKKIEDLIK |
| CG115757-02 | |
| Protein Sequence | YLDPEYIDRIAIPDASKLQFILAAVPEHAARLQRLAQIHIQQQDQCVEITEESKALLEEYNKTTML |
| | LSKQFVQWDELLCQLEAATQVKPAEE |

[0370] Sequence comparison of the above protein sequences yields the following sequence relationships shown in Table 3B.

TABLE 3B
Comparison of NOV3a against NOV3b.

| Protein | NOV3a Residues/ | Identities/Similarities |
|---|---|---|
| Sequence | Match Residues | for the Matched Region |
| NOV3b | 1 . . . 186 | 158/186 (84%) |
| | 1 . . . 158 | 158/186 (84%) |

[0371] Further analysis of the NOV3a protein yielded the following properties shown in Table 3C.

TABLE 3C
Protein Sequence Properties NOV3a

| SignalP | No Known Signal Sequence Predicted | | | | | |
|---|---|---|---|---|---|---|
| analysis: | | | | | | |
| PSORT II | PSG: a new signal peptide prediction method | | | | | |
| analysis: | N-region: length 9; pos. chg 1; neg. chg 1 | | | | | |
| | H-region: length 3; peak value −12.04 | | | | | |
| | PSG score: −16.44 | | | | | |
| | GvH: von Heijne's method for signal seq. recognition | | | | | |
| | GvH score (threshold: −2.1): −5.79 | | | | | |
| | possible cleavage site: between 49 and 50 | | | | | |
| | >>> Seems to have no N-terminal signal peptide | | | | | |
| | ALOM: Klein et al's method for TM region allocation | | | | | |
| | Init position for calculation: 1 | | | | | |
| | Tentative number of TMS(s) for the threshold 0.5: 0 | | | | | |
| | number of TMS(s) . . . fixed | | | | | |
| | PERIPHERAL Likelihood = 2.44 (at 93) | | | | | |
| | ALOM score: 2.44 (number of TMSs: 0) | | | | | |
| | MITDISC: discrimination of mitochondrial targeting seq | | | | | |
| | R content: | | | 2 | Hyd Moment(75): | 1.95 |
| | Hyd Moment(95): | | | 4.15 | G content: | 1 |
| | D/E content: | | | 2 | S/T content: | 1 |
| | Score: −6.20 | | | | | |
| | Gavel: prediction of cleavage sites for mitochondrial preseq | | | | | |
| | cleavage site motif not found | | | | | |
| | NUCDISC: discrimination of nuclear localization signals | | | | | |
| | pat4: none | | | | | |
| | pat7: none | | | | | |
| | bipartite: none | | | | | |
| | content of basic residues: 12.4% | | | | | |
| | NLS Score: −0.47 | | | | | |
| | KDEL: ER retention motif in the C-terminus: none | | | | | |
| | ER Membrane Retention Signals: | | | | | |
| | KKXX-like motif in the C-terminus: KPAE | | | | | |
| | SKL: peroxisomal targeting signal in the C-terminus: none | | | | | |
| | PTS2: 2nd peroxisomal targeting signal: none | | | | | |
| | VAC: possible vacuolar targeting motif: none | | | | | |
| | RNA-binding motif: none | | | | | |
| | Actinin-type actin-binding motif: | | | | | |
| | type 1: none | | | | | |
| | type 2: none | | | | | |
| | NMYR: N-myristoylation pattern : none | | | | | |
| | Prenylation motif: none | | | | | |
| | memYQRL: transport motif from cell surface to Golgi: none | | | | | |
| | Tyrosines in the tail: none | | | | | |
| | Dileucine motif in the tail: none | | | | | |
| | checking 63 PROSITE DNA binding motifs: none | | | | | |
| | checking 71 PROSITE ribosomal protein motifs: none | | | | | |
| | checking 33 PROSITE prokaryotic DNA binding motifs: none | | | | | |
| | NNCN: Reinhardt's method for Cytoplasmic/Nuclear | | | | | |
| | discrimination | | | | | |
| | Prediction: cytoplasmic | | | | | |
| | Reliability: 94.1 | | | | | |
| | COIL: Lupas's algorithm to detect coiled-coil regions | | | | | |
| | 38 | K | 0.52 | | | |
| | 39 | V | 0.52 | | | |
| | 40 | Q | 0.52 | | | |
| | 41 | V | 0.52 | | | |
| | 42 | A | 0.52 | | | |
| | 43 | L | 0.52 | | | |
| | 44 | G | 0.52 | | | |
| | 45 | N | 0.52 | | | |
| | 46 | I | 0.52 | | | |
| | 47 | S | 0.52 | | | |
| | 48 | S | 0.52 | | | |
| | 49 | K | 0.52 | | | |
| | 50 | R | 0.52 | | | |
| | 51 | E | 0.52 | | | |
| | 52 | R | 0.52 | | | |
| | 53 | V | 0.52 | | | |
| | 54 | K | 0.52 | | | |
| | 55 | I | 0.52 | | | |
| | 56 | L | 0.52 | | | |
| | 57 | Y | 0.52 | | | |
| | 58 | K | 0.52 | | | |
| | 59 | K | 0.52 | | | |
| | 60 | I | 0.52 | | | |
| | 61 | E | 0.52 | | | |
| | 62 | D | 0.52 | | | |
| | 63 | L | 0.52 | | | |
| | 64 | I | 0.52 | | | |
| | 65 | K | 0.52 | | | |

```
total: 28 residues
Final Results (k = 9/23):
56.5%: cytoplasmic
26.1%: nuclear
  8.7%: mitochondrial
  4.3%: vacuolar
  4.3%: vesicles of secretory system
>> prediction for CG115757-01 is cyt (k = 23)
```

[0372] A search of the NOV3a protein against the Geneseq database, a proprietary database that contains sequences published in patents and patent publication, yielded several homologous proteins shown in Table 3D.

TABLE 3D
Geneseq Results for NOV3a

| | | | Identities/ | |
|---|---|---|---|---|
| | | | Similarities for | |
| Geneseq | Protein/Organism/Length | NOV3a Residues/ | the Matched | Expect |
| Identifier | [Patent #, Date] | Match Residues | Region | Value |
| AAG04042 | Human secreted protein, SEQ ID NO: | 1 . . . 103 | 100/103 (97%) | 1e−49 |
| | 8123 - Homo sapiens, 103 aa. | 1 . . . 103 | 101/103 (97%) | |
| | [EP1033401-A2, 06 SEP. 2000] | | | |
| AAB45191 | Human secreted protein sequence | 92 . . . 186 | 95/95 (100%) | 2e−47 |
| | encoded by gene 21 SEQ ID NO: | 1 . . . 95 | 95/95 (100%) | |
| | 132 - Homo sapiens, 95 aa. | | | |
| | [WO200058467-A1, 05 OCT. 2000] | | | |
| AAB45190 | Gene 21 human secreted protein | 92 . . . 186 | 95/95 (100%) | 2e−47 |
| | homologous amino acid sequence | 1 . . . 95 | 95/95 (100%) | |
| | #131 - Homo sapiens, 95 aa. | | | |
| | [WO200058467-A1, 05 OCT. 2000] | | | |
| ABB64732 | Drosophila melanogaster polypeptide | 7 . . . 186 | 46/183 (25%) | 3e−04 |
| | SEQ ID NO 20988 - Drosophila | 4 . . . 183 | 83/183 (45%) | |
| | melanogaster, 192 aa. | | | |
| | [WO200171042-A2, 27 SEP. 2001] | | | |
| ABB59344 | Drosophila melanogaster polypeptide | 7 . . . 175 | 38/169 (22%) | 0.37 |
| | SEQ ID NO 4824 - Drosophila | 1007 . . . 1168 | 76/169 (44%) | |
| | melanogaster, 2056 aa. | | | |
| | [WO200171042-A2, 27 SEP. 2001] | | | |

[0373] In a BLAST search of public sequence databases, the NOV3a protein was found to have homology to the proteins shown in the BLASTP data in Table 3E.

TABLE 3E
Public BLASTP Results for NOV3a

| | | | Identities/ | |
|---|---|---|---|---|
| Protein | | | Similarities for | |
| Accession | | NOV3a Residues/ | the Matched | Expect |
| Number | Protein/Organism/Length | Match Residues | Portion | Value |
| O75935 | Dynactin subunit - Homo sapiens | 1 . . . 186 | 186/186 (100%) | e−100 |
| | (Human), 186 aa. | 1 . . . 186 | 186/186 (100%) | |
| Q9D039 | Dynactin 3 - Mus musculus | 1 . . . 186 | 176/186 (94%) | 4e−94 |
| | (Mouse), 186 aa. | 1 . . . 186 | 181/186 (96%) | |
| Q9CR43 | Dynactin 3 - Mus musculus | 1 . . . 186 | 175/186 (94%) | 2e−93 |
| | (Mouse), 186 aa. | 1 . . . 186 | 180/186 (96%) | |
| Q9Z0Y1 | Dynactin light chain - Mus | 1 . . . 186 | 174/186 (93%) | 4e−93 |
| | musculus (Mouse), 186 aa. | 1 . . . 186 | 180/186 (96%) | |
| Q9BPU8 | Similar to dynactin 3 (p22) - | 1 . . . 153 | 141/154 (91%) | 3e−71 |
| | Homo sapiens (Human), 176 aa. | 1 . . . 154 | 147/154 (94%) | |

[0374] PFam analysis predicts that the NOV3a protein contains the domains shown in the Table 3F.

TABLE 3F
Domain Analysis of NOV3a

| | | | |
|---|---|---|---|
| Pfam | NOV3a | Identities/Similarities | Expect |
| Domain | Match Region | for the Matched Region | Value |

### Example 4.

[0375] The NOV4 clone was analyzed, and the nucleotide and encoded polypeptide sequences are shown in Table 4A.

TABLE 4A
NOV4 Sequence Analysis

| | SEQ ID NO:15 | 3570 bp | |
|---|---|---|---|
| NOV4a, | ATCACGCGTATCCAGGCCCAGTCCCGAGGTGTGCTCGCCAGAATGGAGTACAAAAAGCTGCTGGAA | | |
| CG120781-01 | | | |
| DNA Sequence | CGTAGAGACTCCCTGCTGGTAATCCAGTGGAACATTCGGGCCTTCATGGGGGTCAAGAATTCGCCC | | |
| | TGGATGAAGCTCTACTTCAAGATCAAGCCCCTCCTGAAGAGTGCAGAAAGAGAGAAGGAGATGGCC | | |
| | TCCATGAAGGAGGAGTTCACACGCCTCAAAGACGCCCTAGAGAAGTCCGAGGCTCCCCGCAACGAA | | |
| | TCGGAGGAGAAGATGGTGTCCCTGCTGCAGGAGAAGAATGACCTGCAGCTCCAACTGCAGGCGGAA | | |
| | CTCGGACAACCTGGCAGATGCTGAGGAGCGCTGTGATCAGCTGATCAAAAACAAGATTCACCTGAG | | |
| | CAACAAGGTGAAGGAGATCAACGAGAGGCTGGAGGATGAGGAGGAGATGAATGCTGAGCTCCTGCC | | |
| | GCCAAGGTGAAGGAGATGAACGAGAGGCTGGAGGATGAGGAGGAGATGAATGCTGAGCTCACTGCC | | |
| | AAGAAGCGCAAGCTGGAAGATGAGTGCTCAGAGCTCAAAACGGACATCGATGATCTGGAGCTGACA | | |
| | CTGGCCAAAAGTGGAGAAGGAGAACACGCAACAGAGAACAAGGTGAAAAACCTGACAGAGGAGATG | | |
| | GCTGGCTGGAAAGATGAGATCATTGCCAAGCTGACCAAGAGAAGAGCTCTGCAAGAAACCCACCAA | | |
| | CAGGGCTCTGGATGACCTTCAGGCCGAGGAGGACAGGTCAACACCCTGACTAAGGCCAAAGTCAAG | | |
| | CTGGAGCAGCAGTGGATGATCTGGAAGGATCCCTGGAGCAAGAGAAGAAGGTGCGAATGGAACCTG | | |
| | GAGCGAGCGAAGCGGAAGCTGGAGGGCGACCTGAAGCTGACCCAGGAGAGCATCATGGACCTGGAG | | |
| | AATGACAAGCAGCAGCTGGAGGAGCGGCTGAAAAAAAAGACTTTGAGCTGAATGCTCTCAACGGCA | | |
| | AGGCAGAGGAACTTCGACAAGATCCTGGCCGAGTGGAAGCAGAAGTATGAGGAGTCGCAGTCGGAG | | |
| | ATCGAGGAGCTGGAGCAGGAGCTGGAGGCCGAGCGCACCGCCAGGGCTAAGGTGGAGAAGCTGCGC | | |
| | TCAGACCTGTCTCGGGAGCTGGAGGAGAAAATGCAGCGAGCGGCTGAAACCGGCAAAACCACGTCC | | |
| | GTGCAGATCGAGATGAACAAGAAGCGCGAGGCCGAGTTCCAGAAGATGCGGCGAAACCTGGAAAAG | | |
| | GCCACCCTGCAGCACGAAGCCACTGCCGCGGCCCTGCGCAAGAAGCACGCCGACAGCGTAACCGAG | | |
| | CTGGCGAGCAGATCGACAAAGGCCTGCAGCGGGTGAGCAGAAGCTGGAGAAAAGAAGAGCGAGTTC | | |
| | AAGCTGGAGCTGGATGACGTCACCTCCAACAAGGAGGGTGGAGCAGATCATCACCCTAACCTAAAC | | |
| | AAGATGTGCCGGACCTTGGAAGACCAGATGAATGAGCACCGGAGCAAGGCGGAAAAGACCCAGCGT | | |
| | TCTGTCAACGACCTCACCAGCCAGCGGGCCAAGTTCCAAACCGAGAATGGTGAGCTGTCCCGGAAG | | |
| | CTGGTGAGGAAGGAGGCACTGATCTCCCAGCTGACCCGAGGCAAGCTCACCTACACCCAGCAGCTG | | |
| | GAGGACCTCAACAGGCAGCTGGAGGAGGACGTTAAGGCGAAGAACGCCCTGGCCCACGCACTGCAG | | |
| | TCGGCCCCGCATGACTGCGACCTGCTGCGGGAGCAGTACGAGGAGGAGACGGAGGCCAAGGCCGAG | | |
| | CTGCAGCGCGTCCTTTCCAGCCGGAAACTCGGAGGTGCCCAGTGGAGGACCAAGTATGAGACAAAC | | |
| | GCCTTCAGCGGAACTGAGGAGCTCGAGGAGGCCAAGAAGAAGCTGGCCCAGCGGCTGCAAAAAGCT | | |
| | GAGGAGGCCGTGGAGGCTGTTAATGCCAAGTGCTCCTCGCTGGAGAAGACCAAGCACCGGCTACAG | | |
| | GATGGAGATCGAGAGACTTGATAATGACGTAGAGCGCTCCATGCTGCTGCTGCAGCCCTAAACAAG | | |
| | AGCAGAGGAACTTCAGACAAGATCCTGGCCGACTGGAAGCAGAAGTATGAAAAGTCGCAGTCGGAG | | |
| | CTGGAAGTCCTCGGCAGAAGGAGGCTCGCTCCCTCAGCACAGAGCTCTTCAACTAAGAACGCCTAT | | |
| | GGAGGAGTCCCTGGAACATCTGGAGACCTTCAAGCGGGAGAACAAAACCTGCAGGAAAAGATCTCC | | |
| | GGACTTGACTGAAGCAGTTGGGTTCCAGCGGAAAGACTATCCATGAGCTAAAGAATCCGAAAGCAG | | |
| | GTGAGGCCGGAGAAGATGGAGCTGCAGTCAGCCCTGGAGGAGGCCCAAACCTCCCTGGAGCACGAG | | |
| | GAGGGGCAAGATCCTCCGGGCCCAGCTGGAGTTCAACCAGATCAGGCAGAGATCGAGCAAAAGCTG | | |
| | ACCAGAGAAGGAGGAGAGGAGATGACAGGCCAAGCGcACCACCTGCGAATGGTAAACTCGCTGCAG | | |
| | GAGTTGCGTGCCGTGGTGGAGCAGACAGAGCGGTCCCGGAACCTGGCGGACGAGGAGCTGATTGAG | | |
| | GACCTCAATGAGATGGAGATCCAGCTCAGCCACGCCAACCGCATAACCGCCGAGGCCCACAAGCAA | | |
| | GTCAAGAGCCTCCAGAGCTTGTTGAAGGACACCCAGATTCAGCTGGACGATGCAGTCCGTGCCAAC | | |
| | GAGGACCTGAAGGAGAACATCGCCATCGTGGAGCGGCGCAACAACCTGCTCCAGGCTGAGCTGGAC | | |
| | GAGTTGCGTCCCGTGGTGGAGCAGACAGAGCGGTCCCGGAAGCTGGCAAACGAGCAGCTGATTGAG | | |
| | ACTAGTGAGCGGGTGCAGCTGCTGCATTCCCAGAACACCAGCCTCATCAACCAGAAGAAGAAGATG | | |
| | GATGCTGACCTGTCCCACCTCCAGACTGAAGTGGAGGACGCAGTGCAGGAGTCCAGGAATGCTGAG | | |
| | GAGAAGGCCAGAAGGCCAATCACGGATGCCGCCATGATGGCAGAGGAGCTGAAGAAGGAGCAAAAC | | |
| | ACCAGCGCCCACCTGGAGCGCATGAGGAAAAGAACATGGAACAGACCATTAAACCTGCAGCACCAA | | |
| | CTGGACGAAGCCGAGCAGATCGCCCTCAAGGGCGGCAAGAAGCAGCTGCAGAAGCTGGAAGCGCGG | | |
| | GTGCGGAGCTGGGAGAATGAGCTGGAGGCCGAGCAGAAGCGCAACGCAGAGTCAATGAAGAACATG | | |
| | AGGAAGAGCGAGCGGCGCATCAAGGAGCTCACCTACCAGACGGAGCAAAACAGGAAAAACCTGCTG | | |
| | CGGCTGCAGGACCTGGTAGACAAGCTGCAGCTAAAGGTCAAGGCCTACAAGCGCCAGGCCGAGGAG | | |
| | GCGGAGGAGCAAGCCAACACCAACCTGTCCAAGTTCCGCAAGGTGCAGCACGACCTGGATGAGGCA | | |
| | GAGGAGCGGGCGGACATCGCCGAGTCCCAGGTCAACAACCTGCGGGCCAAGAGCCGTGACATTGGC | | |
| | ACGAAGGGCTTGAATGAGGAGTAGCTTTGCCACATCTTGATCTGCTCAGCCCTGGAAATGCCAGCA | | |
| | AAGCCCCAATGCTGGAGCCTGTGTACAGCTCCTTGGGAGGAAGCAGAATAAGCAATTTTCCTTGA | | |
| | AGCCGA | | |
| | ORF Start: ATG at 43 | | ORF Stop: TAG at 3454 |
| | SEQ ID NO:16 | 1137 aa | MW at 132393.8 kD |
| NOV4a, | MEYKKLLERRDSLLVTQWNIRAFMGVKNWPWMKLYFKIKPLLKSAEREKEMASMKEEFTRLKEALE | | |
| CG120781-01 | | | |
| Protein Sequence | KSEARRKELEEKMVSLLQEKNDLQLQVQAEQDNLADAEERCDQLIKNKIQLEAKVKEMAAERLEDEE | | |
| | EMANAELTAKKRKLEDECSELKRDIDDLELTLAKVEKEKHATENKVKNLTEEMAGLDEIIAKLTKEK | | |
| | KALQEAHQQALDDLQAEEDKVNTLTKAKVKLEQQVDDLEGSLEQEKKVRMDLERAKRKLEGDLKLT | | |
| | QESIMDLENDKQQLEERLKKKDFELNALNARIEDEQALGSQLQKKLKELQARIEELEEELEAERTA | | |
| | RAKVEKLRSDLSRELEEISERLEEAGGATSVQIEMNKKREAEFQKMRRDLEEATLQHEATAAALRK | | |
| | KHADSVAELGEQIDAALQRVKQKLEKEKSEFKLELDDVTSNMEQIKAKANLEKMCRTLEDQMNEHR | | |
| | SKAEETQRSVNDLTSQRAKLQTENGELSRQLDEKEALISQLTRGKLTYTQQLEDLKRQLEEEVKAK | | |
| | NALAHALQSARHDCDLLREQYEEETEAKAELQRVLSKANSEVAQWRTKYETDAIQRTEELEEAKKK | | |
| | LAQRLQEAEEAVEAVNAKCSSLEKTKHRLQNEIELMVDVERSIAAAAALDKKQRNFDKILAAEWKG | | |
| | KYEESQSELESSQKEARSLSTELFKLAAAYEESLEHLETFKENAALQEEISDRLTEQAASSGKTIH | | |
| | ELEKVRKQLEAEKMELQSALEEAEASLEHEEGKILRAQLEFNQIKAEERKLAEKDEEEMEQAKRNH | | |
| | LRVVDSLQTSLDAETRSRNEALRVKKKMEGDLNEMEIQLSHANRMAAEAQKQVKSLQSLLKDTQIQ | | |
| | LDDAVRANDDLKENIAIVERRNNLLQAELEELRAVVEQTERSRKLADEELIETSERVQLLHSQNTS | | |
| | LINOKKKMDADLSQLQTEVEEAVQECRNAEEKAKKAITDAAMMAEELKKEQDTSAIHERNKKNMEQ | | |
| | TIKDLQHRLDEAEQIALKGGKKQLQKLEARVRELEAAELEAEQKRNESVKGMRKSERRIKELTYQT | | |
| | EEDRKNLLRLQDLVDKLQLKVKAYKRQAEEAEEQANTNLSKFRKVQHELDEAEERADIAESQVNKL | | |
| | RARSRDIGTKGLNEE | | |
| | SEQ ID NO:17 | 4775 bp | |
| NOV4b, | TGTCTTTCCCTGCTGCTCTCAGGTCCCCTGCAGGCCTTGGCCCCTTTCCTCATCTGTAGACACACT | | |
| CG120781-03 | | | |
| DNA Sequence | TGAGTAGCCCAGGCACAGCCATGGGAGATTCGGAGATGGCAGTCTTTGGGGCTGCCGCCCCCTACC | | |
| | TGCGCAGTCAACAGAAGGAGCGGCTAGAAGCGCAGACCACGCCTTTTGACCTCAAGAACGATGTCT | | |
| | TCGTGCCTGATGACAAACAGGAGTTTGTCAAGGCCAAGATCGTGTCTCGAGAGGGTGGCAAAGTCA | | |
| | CTGCCGAGACTGAGTATGGCAAGACAGTGACCGTGAAGGAGGACCAGGTGATGCAGCAGAACCCAC | | |
| | CCAAGTTCGACAAAATCGAGGACATGGCCATGCTGACCTTCCTGCATGAGCCCGCGGTGCTCTACA | | |
| | ACCTCAAGGATCGCTACGGCTCCTCGATGATCTACACCTACTCGCGCCTCTTCTGTGTCACCGTCA | | |
| | ACCCTTACAAGTGGCTGCCGGTGTACACTCCTGAGGTGGTGGCTCCCTACCGGGGCAAGAAGAGGA | | |
| | GCGAGGCCCCGCCCCACATCTTCTCCATCTCCGACAACGCCTATCAGTACATGCTGACAGACAGAG | | |
| | AAAACCAGTCCATCCTGATCACCGGAGAATCCGGAGCAGGGAAGACAGTCAACACCAAGAGGGTCA | | |
| | TCCAGTACTTTGCTGTTATTGCAGCCATTGGGGACCGCAGCAAGAAGGACCAGAGCCCGGGCAAGG | | |
| | GCACCCTGGAGGACCAGATCATCCAGGCCAACCCTGCTCTGGAGGCCTTTGGCAATGCCAAGACCG | | |
| | TCCGGAACGACAACTCCTCCCGCTTCGGGAAATTCATTCGAATTCATTTTGGGGCAACAGGAAAGT | | |
| | TGGCATCTGCAGACATAGAGACCTATCTTCTGGAAAAATCCAGAGTTATTTTCCAGCTGAAAGCAG | | |
| | AGAGAGATTATCACATTTTCTACCAAATCCTGTCTAACAAAAAGCCTGAGCTGCTGGACATGCTGC | | |
| | TGATCACCAACAACCCCTACGATTATGCATTCATCTCCCAAGGAGAGACCACCGTGGCCTCCATTG | | |
| | ATGACGCTGAGGAGCTCATGGCCACTGATAACGCTTTTGATGTGCTGGGCTTCACTTCAGAGGAGA | | |
| | AAAACTCCATGTATAAGCTGACAGGCGCCATCATGCACTTTGGAAACATGAAGTTCAAGCTGAAGC | | |
| | AGCGGGAGGAGCAGGCGGAGCCAGACGGCACTGAAGAGGCTGACAAGTCTGCCTACCTCATGGGGC | | |
| | TGAACTCAGCCGACCTGCTCAAGGGGCTGTGCCACCCTCGGGTGAAAGTGGGCAATGAGTACGTCA | | |
| | CCAAGGGGCAGAATGTCCAGCAGGTGATATATGCCACTGGGGCACTCGCCAAGGCAGTGTATGAGA | | |
| | GGATGTTCAACTGGATGGTGACGCGCATCAATGCCACCCTGGAGACCAAGCAGCCACGCCAGTACT | | |
| | TCATAGGAGTCCTGGACATCGCTGGCTTCGAGATCTTCCATTTCAACAGCTTTCAGCAGCTCTGCA | | |
| | TCAACTTCACCAACGAGAAGCTGCAGCAGTTCTTCAACCACCACATGTTTGTGCTCGAGCAGGAGG | | |
| | AGTACAAGAAGGAGGGCATCGAGTGGACATTCATTGACTTTGGCATGGACCTGCAGGCCTGCATTG | | |
| | ACCTCATCGAGAAGCCCATGGGCATCATGTCCATCCTGGAAGAGGAGTGCATGTTCCCCAAGGCCA | | |
| | CCGACATGACCTTCAAGGCCAAGCTGTTTGACAACCACCTGGCCAAATCCGCCAACTTCCAGAAGC | | |
| | CACGAAATATCAAGGGGAAGCCTGAAGCCCACTTCTCCCTGATCCACTATGCCGGCATCGTGGACT | | |
| | ACAACATCATTGGCTGGCTGCAGAAGAACAAGGATCCTCTCAATGAGACTGTCGTGGGCTTGTATC | | |
| | AGAAGTCTTCCCTCAAGTTGCTCAGCACCCTGTTTGCCAACTATGCTGGGGCTGATGCGCCTATTG | | |
| | AGAACGCCAAAGGCAAGGCCAAGAAAGGCTCGTCCTTTCAGACTGTGTCAGCTCTGCACAGGGAAA | | |
| | ATCTGAACAAGCTGATGACCAACTTGCGCTCCACCCATCCCCACTTTGTACGTTGTATCATCCCTA | | |
| | ATGAGACAAAGTCTCCAGGCGTGATGGACAACCCCCTGGTCATGCACCAGCTGCGCTGCAATGGTG | | |
| | TGCTGGAGGGCATCCGCATCTGCAGGAAAGGCTTCCCCAACCGCATCCTCTACGGGGACTTCCGGC | | |
| | AGAGGTATCGCATCCTCAACCCAGCGGCCATCCCTGAGGGACAGTTCATTGATAGCAGGAAGGGGG | | |
| | CAGAGAAGCTGCTCAGCTCCCTGGACATTGATCACAACCAGTACAAGTTTGGCCACACCAAGGTGT | | |
| | TCTTCAAGGCCGGGCTGCTGGGGCTGCTGGAGGAAATGAGGGACGAGAGGCTGAGCCGCATCATCA | | |
| | CGCGTATCCAGGCCCAGTCCCGAGGTGTGCTCGCCAGAATGGAGTACAAAAAGCTGCTGGAACGTA | | |
| | GAGACTCCCTGCTGGTAATCCAGTGGAACATTCGGGCCTTCATGGGGGTCAAGAATTGGCCCTGGA | | |
| | TGAAGCTCTACTTCAAGATCAAGCCGCTGCTGAAGAGTGCAGAAAGAGAGAAGGAGATGGCCTCCA | | |
| | TGAAGGAGGAGTTCACACGCCTCAAAGACGCCCTAGAGAAGTCCGAGGCTCGCCGCAAGGAGCTGG | | |
| | CAGGAGAAGATGGTGTCCCTGCTGCAGGAGAGAATGACCTGCACCTCCAAGTGCAGGCGGAACAAG | | |
| | ACAACCTGGCAGATGCTGAGGAGCGCTGTGATCAGCTGATCAAAACAAGATTCAGCTGGAGAACTA | | |
| | AGGTGAAGGAGATGAACGAGAGGCTGGAGGATGAGGAGGAGATGAATGCTGAGCTCACTGCCAAGA | | |
| | AGCGCAAGTTGGAAGATGAGTGCTCAGAGCTCAAAAGGGACATCGATGATCTCGAGCTGACACTGG | | |
| | CCAAAGTGGAGAAGGAGAAACACGCAACAGAGAACAAGGTGAAAAACCTGACAGAGGAGATGGCTG | | |
| | GGCTGGATGAGATCATTGCCAAGCTGACCAAGGAGAAGAAAGCTCTGCAAGAGGCCCACCAACAGG | | |
| | CTCTGGATGACCTTCAGGCCGAGGAGGACAAGGTCAACACCCTGACTAAGGCCAAAGTCAAGCTCG | | |
| | ACCAGCAAGTGGATGATCTGGAAGGATCCCTGGAGCAAGAGAAGAAGGTGCGCATGCACCTCGAGC | | |
| | CAGCGAAGCGGAAGCTGGAGGGCGACCTGAAGCTGACCCAGGAGAGCATCATCGACCTGGAGAATG | | |
| | ACAAGCAGCAGCTCGATGAGCGGCTGAAAAAAAAAGACTTTGAGCTGAATGCTCTCAACGCAAGGA | | |
| | TTGAGGATGAACAGGCCCTCGGCAGCCAGCTGCAGAAGAAGCTCAAGGAGCTTCAGGCACGCATCG | | |
| | CAGGAGCTGGAGGAGGAGCTGACGCCGAGAAGATGGAGCTGCAGTCAGCCCTGGAGGAGGCCGAGG | | |
| | CCTCCCTGGAGCACGAGGAGGGCAAGATCCTCCGGGCCCAGCTGGAGTTCAACCAGATCAAGGCAG | | |
| | AGATCGAGCGGAAGCTGGCAGAGAAGGACGAGGAGATGGAACAGGCCAAGCGCAACCACCTGCGGG | | |
| | TGGTGGACTCGCTGCAGACCTCCCTGGACGCAGAGACACGCAGCCGCAACGAGCCCCTGAGGGTGA | | |
| | AGAAGAAGATGGAAGGAGACCTCAATGAGATGGAGATCCAGCTCAGCCACGCCAACCCCATGGCCG | | |
| | CCGAGGCCCAGAAGCAAGTCAAGAGCCTCCAGAGCTTGTTGAAGGACACCCAGATTCAGCTGGACG | | |
| | ATGCAGTCCGTGCCAACGACGACCTGAAGGAGAACATCGCCATCGTGGAGCGGCGCAACAACCTGC | | |
| | TGCAGGCTGAGCTGGAGGAGTTGCGTGCCGTGGTGGAGCAGACAGAGCGGTCCCGGAAGCTGGCGG | | |
| | AGCAGGAGCTGATTGAGACTAGTGAGCGGGTGCAGCTGCTGCATTCCCAGAACACCACCCTCATCA | | |
| | ACCAGAAGAAGAAGATGGATGCTGACCTGTCCCAGCTCCACACTGAAGTGGAGGAGGCAGTGCAGG | | |
| | AGTGCAGGAATGCTGAGGAGAAGGCCAAGAACGCCATCACGGATGCCGCCATGATGGCAGAGGAGC | | |
| | TGAAGAAGGAGCAGGACACCAGCGCCCACCTGGAGCGCATGAAGAACAACATGCAACAGACCATTA | | |
| | CAGGACCTGCAGCACCGGCTGACGAAGCCGAGCAGATCGCCCTCAAGGGCGGCAAGAAGCAGCTGC | | |
| | AGAAGCTCGAAGCGCGGGTGCGGGAGCTGGAGAATGAGCTGGAGGCCCAGCAGAAGCGCAACGCAG | | |
| | AGTCGGTGAAGGGCATGAGGAAGAGCGAGCGGCGCATCAACGAGCTCACCTACCAGACGGAGGAGG | | |
| | ACAGGAAAAACCTGCTGCGGCTGCAGGACCTCGTAGACAAGCTGCAGCTAAAGGTCAAGGCCTACA | | |
| | AGCGCCAGGCCGAGGAGGCGGAGGAGCAAGCCAACACCAACCTGTCCAAGTTCCGCAACGTCCAGC | | |
| | ACGAGCTGCATGAGGCAGAGGAGCGGGCGGACATCGCCGAGTCCCACGTCAACAAGCTGCGGGCCA | | |
| | AGAGCCGTGACATTGGCACGAACGGCTTGAATGAGGAGTAGCTTTGCCACATCTTGATCTGCTCAG | | |
| | CCCTGGAGGTGCCAGCAAAGCCCCATGCTGGAGCCTGTGTAACAGCTCCTTGGGAGGAAGCAGAAT | | |
| | AAAGCAATTTTCCTTGAAGCCGA | | |
| | ORF: Start: ATG at 87 | | ORF Stop: TAG at 4659 |
| | SEQ ID NO:18 | 11524 aa | MW at 175519.4 kD |
| NOV4b, | MGDSEMAVFGAAAPYLRKSEKERLEAQTRPFDLKKDVFVPDDKOEFVKAKIVSREGGKVTAETEYG | | |
| CG120781-03 | | | |
| Protein Sequence | KTVTVKEDQVMQQNPPKFDKTEDMAMLTFLHEPAVLYNLKDRYGSWMIYTYSGLFCVTVNPYKWLP | | |
| | VYTPEVVAAYRGKKRSEAPPMIFSISDNAYQYMLTDRENQSILITGESGAGKTVNTKRVIQYFAVT | | |
| | AAIGDRSKKDQSPGKGTLEDQIIQANPALEAFGNAKTVRNDNSSRFGKFIRIHFGATGKLASADIE | | |
| | TYLLEKSRVIFQLKAERDYHIFYQILSNKKPELLDMLLITNNPYDYAFISQGETTVASIDDAEELM | | |
| | ATDNAFDVLGFTSEEKNSMYKLTGAIMHFGNMKFKLKQREEQAEPDGTEEADKSAYLMGLNSADLL | | |
| | KGLCHPRVKVGNEYVTKGQNVQQVIYATGAIAKAVYERNFNWMVTRINATLETKQPRQYFIGVLDI | | |
| | AGFEIFDFNSFEQLCINFTNEKLQQFFNIIMFVLEQEEYKKEGIEWTFIDFGMDLQACIDLIEKPM | | |
| | GINSILEEECMFPKATDMTFKAKLFDNHLGKSANFQKPRPIKGKPEAHFSLIHYAGIVDYNIIGWL | | |
| | QKNKOPLNETVVGLYQKSSLKLLSTLFANYAGADAPIEKGKGKAKKGSSFQTVSALHRENLNKLMT | | |
| | NLRSTHPHPVRCIPNETKSPGVMDNPLVMIIQLRCNGVLEGIRICRKGEPNRILYGDFRQRYRILN | | |
| | PAAIPEGOFIDSRKGAEKLLSSLDIDHNQYKFGHTFVFFKAGLLGLLEEMRDERLSRIITRIQAQS | | |
| | RGVLARNEYKKLLERRDSLLVIONNIRAFMGVKNWPWMKLYFKIKPLLKSAEREKEMASMKEEPTR | | |
| | LKEILEKSEARRKELEEKMVSLLQEKNDLQLQVQAEQDNLADAEERCDQLTKNKIQLEAKVKEMNE | | |
| | RGVEDEEEMNAELTAKKRKLEDECSELKRDIDDLELTLAKVEKEKHATENKVKNLTEEMAGLDEIA | | |
| | KLTKEKKALQEAHQQALDDLQAEEDKVNTLTKAKVKLEQQVDDLEGSLEQECKVRMDLERAKRKLE | | |
| | GDLKLTQESIMDLENDKQQLDERLKKKDFELNALNARIEDEQALGSQLQKKLKELQARIEELEEEL | | |
| | EAEKMELQSALEEAEASLEHEEGKILRAQLEFNQIKAEIRKTIAEKDEEMEQAKRNMLRVVDSLQT | | |
| | SLDAETRSRNEALRVKKKMEGDLNEMEIQLSHANRMAAEAQKQVKSLQSLLKDTQIQLDDAVRAND | | |
| | DLKENIAIVERRNNLLQAELEELRAVVEQTERSRKLAEQELIETSERVQLLHSQNTSLINQKKKMD | | |
| | ADLSQLQTEVEEAVQECRNAEEKAKKAITDANMAEELKKEQDTSAIILERNKKNMEQTIKDLQHRL | | |
| | DEAEQIALKGGKKQLQKLEARVRELENELEAEQKRNAESVKGMRKSERRIKELTYQTEEDRKNLLR | | |
| | LQDLVDKOLKVKAYKJQAEEAEEQATNTNLSKFRKVQHELDEASERADIAESQVNKLRAKSRDIGT | | |
| | KGLNEE | | |
| | SEQ ID NO:19 | 5780 bp | |
| NOV4c, | TGTCTTTCCCTGCTGCTCTCAGGTCCCCTGCAGGCCTTGGCCCCTTTCCTCATCTGTAGACACACT | | |
| CG120781-04 | | | |
| DNA Sequence | TGAGTAGCCCAGGCACAGCCATGGGAGATTCGGAGATGGCAGTCTTTGGGGCTGCCGCCCCCTACC | | |
| | TGCGCAAGTCAGAGAAGGAGCGGCTAGAAGCGCAGACCAGGCCTTTTGACCTCAAGAAGGATGTCT | | |
| | TCGTGCCTGATGACAAACAGGAGTTTGTCAAGGCCAAGATCGTGTCTCGAGAGGGTGGCAAAGTCA | | |
| | CTGCCGAGACTGAGTATGGCAAGACAGTGACCGTGAAGGAGGACCAGGTGATGCAGCAGAACCCAC | | |
| | CCAAGTTCGACAAAATCGAGGAGATGGCCATGCTGACCTTCCTGCATGAGCCCGCGGTGCTCTACA | | |
| | ACCTCAAGGATCGCTACGGCTCCTGGATGATCThCACCTACTCGGGCCTCTTCTGTGTCACCGTCA | | |
| | ACCCTTACAAGTGGGTGCCGGTGTACACTCCTGAGGTGGTGGCTGCCTACCGGGGCAAGAAGAGGA | | |
| | CCGAGGCCCCGCCCCACATCTTCTCCATCTCCGACAACGCCTATCAGTACATGCTGACAGACAGAG | | |
| | AAAACCAGTCCATCCTGATCACCGGAGAATCCGGAGCAGGGAAGACAGTCAACACCAAGAGGGTCA | | |
| | TCCAGTACTTTGCTGTTATTGCAGCCATTGGGGACCGCAGCAAGAACGACCAGAGCCCGGGCAAGG | | |
| | GCACCCTGGAGGACCAGATCATCCAGGCCAACCCTGCTCTGGAGGCCTTTGGCAATGCCAAGACCG | | |
| | TCCCGAACGACAACTCCTCCCGCTTCGGGAAATTCATTCGAATTCATTTTGGGGCAACAGGAAAGT | | |
| | TGGCATCTGCAGACATAGAGACCTATCTTCTGGAAAAATCCAGAGTTATTTTCCAGCTGAAAGCAG | | |
| | AGAGAGATTATCACATTTTCTACCAAATCCTGTCTAACAAAAAGCCTGAGCTGCTGGACATGCTGC | | |
| | TGATCACCAACAACCCCTACGATTATGCATTCATCTCCCAAGGAGAGACCACCGTGGCCTCCATTG | | |
| | ATGACGCTGAGGAGCTCATGGCCACTGATAACGCTTTTGATGTGCTGGGCTTCACTTCAGAGGAGA | | |
| | AAAACTCCATGTATAAGCTGACAGGCGCCATCATGCACTTTGGAAACATGAAGTTCAAGCTGAAGC | | |
| | AGCGGGAGGAGCAGGCGGAGCCAGACGGCACTGAAGAGGCTGACAAGTCTGCCTACCTCATGGGGC | | |
| | TGAACTCAGCCGACCTGCTCAAGGGGCTGTGCCACCCTCCGGTGAAAGTGGGCAATGAGTACGTCA | | |
| | CCAAGGGGCAGAATGTCCAGCACGTGATATATGCCACTGGGGCACTGGCCAAGGCAGTGTATGACA | | |
| | GGATGTTCAACTGGATCGTGACGCCCATCAATGCCACCCTGGAGACCAAGCAGCCACGCCAGTACT | | |
| | TCATAGGAGTCCTGGACATCGCTGGCTTCGAGATCTTCGATTTCAACAGCTTTGAGCAGCTCTGCA | | |
| | TCAACTTCACCAACGAGAAGCTGCAGCAGTTCTTCAACCACCACATGTTTGTGCTGGAGCAGGAGG | | |
| | AGTACAAGAAGGAGGGCATCGAGTGGACATTCATTGACTTTCGCATGGACCTGCAGGCCTGCATTG | | |
| | ACCTCATCGAGAAGCCCATGGGCATCATGTCCATCCTGGAAGAGGAGTGCATGTTCCCCAAGGCCA | | |
| | CCGACATGACCTTCAACGCCAAGCTGTTTGACAACCACCTGGGCAAATCCGCCAACTTCCAGAAGC | | |
| | CACGAAATATCAAGGGGAAGCCTGAAGCCCACTTCTCCCTGATCCACTATGCCGGCATCGTGGACT | | |
| | ACAACATCATTGGCTGGCTGCAGAAGAACAAGGATCCTCTCAATGAGACTGTCGTGGGCTTGTATC | | |
| | AGAAGTCTTCCCTCAAGTTGCTCAGCACCCTGTTTGCCAACTATGCTGGGGCTGATGCGCCTATTG | | |
| | AGAAGGGCAAAGGCAACGCCAAGAAAGGCTCGTCCTTTCAGACTGTGTCAGCTCTGCACAGGGAAA | | |
| | ATCTGAACAAGCTGATGACCAACTTGCGCTCCACCCATCCCCACTTTGTACGTTGTATCATCCCTA | | |
| | ATGAGACAAAGTCTCCAGGCGTGATGGACAACCCCCTGGTCATGCACCAGCTGCGCTGCAATGGTG | | |
| | TGCTGGAGCCCATCCGCATCTGCAGGAAAGGCTTCCCCAACCGCATCCTCTACGCGGACTTCCCGC | | |
| | AGAGGTATCCCATCCTGAACCCAGCGGCCATCCCTGAGGGACAGTTCATTGATAGCAGGAAGGGGG | | |
| | CACAGAAGCTGCTCAGCTCCCTGGACATTGATCACAACCAGTACAAGTTTGGCCACACCAAGGTGT | | |
| | TCTTCAACGCCGGGCTGCTCGCGCTGCTGCACGAAATGAGGGACCAGAGGCTGAGCCGCATCATCA | | |
| | CGCGTATCCACCCCCAGTCCCGAGGTGTGCTCGCCAGAATGGAGTACAAAAAGCTCCTGGAACGTA | | |
| | GAGACTCCCTGCTGGTAATCCAGTGGAACATTCGGGCCTTCATCGGGGTCAAGAATTGGCCCTGGA | | |
| | TGAAGCTCTACTTCAAGATCAAGCCGCTGCTGAAGAGTGCAGAAAGAGAGAAGGAGATGGCCTCCA | | |
| | TGAAGGAGGAGTTCACACCCCTCAAAGAGGCGCTACACAAGTCCCAGGCTCGCCCCAACGACCTGG | | |
| | AGGAGAAGATGTGGTCCCTGCTGCAGGAGAAGAATGACCTGCAGCTCCAAGTGCAGGCGGAACAAG | | |
| | ACAACCTGGCAGATGCTGAGGAGCGCTGTGATCAGCTGATCAAAAACAAGATTCAGCTGGAGGCTA | | |
| | AGGTGAAGGAGATGAACGAGAGGCTGGAGGATGAGGAGGAGATGAATGCTGAGCTCACTGCCAAGA | | |
| | AGCGCAAGTTGGAAGATGAGTGCTCAGAGCTCAAAAGGGACATCGATGATCTGGAGCTGACACTGG | | |
| | CCAAAGTCGAGAAGGAGAAACACGCAACAGAGAACAAGGTCAAAAACCTGACAGAGGAGATGGCTG | | |
| | GGCTGGATGAGATCATTGCCAAGCTGACCAAGGAGAAGAAAGCTCTGCAAGAGGCCCACCAACAGG | | |
| | CTCTGGATGACCTTCAGGCCGAGGAGGACAAGGTCAACACCCTGACTAAGGCCAAAGTCAAGCTGG | | |
| | AGCAGCAAGTGGATGATCTGGAAGGATCCCTGGAGCAAGAGAAGAAGGTGCGCATGGACCTGGAGC | | |
| | GAGCGAAGCGGAAGCTGGAGGGCGACCTGAAGCTGACCCAGGAGAGCATCATGGACCTGGAGAATG | | |
| | ACAAGCAGCAGCTGGATGAGCGGCTGAAAAAAAAAGACTTTGAGCTGAATGCTCTCAACGCAAGGA | | |
| | TTGAGGATGAACAGGCCCTCGGCAGCCAGCTGCAGAAGAAGCTCAAGGAGCTTCAGGCACGCATCG | | |
| | AGGAGCTCGAGGAGGAGCTGGAGTCCGAGCGCACCGCCAGGGCTAAGGTGGAGAAGCTGCGCTCAG | | |
| | ACCTGTCTCGGGAGCTGGAGGAGATCAGCGAGCGGCTGGAAGAGGCCGGCGGGGCCACGTCCGTGC | | |
| | AGATCGAGATGAACAAGAAGCGCGACGCCGAGTTCCAGAAGATGCGGCGGGACCTGGAGGAGGCCA | | |
| | CGCTGCAGCACGAGGCCACTGCCGCGGCCCTGCGCAAGAAGCACGCCGACAGCGTGGCCGAGCTGG | | |
| | GCGAGCAGATCGACAACCTGCAGCGGGTGAAGCAGAAGCTGGAGAAGGAGAAGAGCGAGTTCAAGC | | |
| | TGGAGCTGGATGACGTCACCTCCAACATGGAGCAGATCATCAAGGCCAAGGCTAACCTGGAGAAGA | | |
| | TGTGCCGGACCTTGGAAGACCAGATGAATGAGCACCGGAGCAAGGCGGAGGAGACCCAGCGTTCTG | | |
| | TCAACGACCTCACCAGCCAGCGGGCCAAGTTGCAAACCGAGAATGGTGAGCTGTCCCGGCAGCTGG | | |
| | ATGAGAAGGAGGCACTGATCTCCCAGCTGACCCGAGGCAAGCTCACCTACACCCAGCAGCTGGAGG | | |
| | ACCTCAAGAGGCAGCTGGAGGAGGAGGTTAAGGCGAAGAACGCCCTGGCCCACGCACTGCAGTCGG | | |
| | CCCGGCATGACTGCGACCTGCTGCGGGAGCAGTACGAGGAGGAGACGGAGGCCAAGGCCGAGCTGC | | |
| | AGCGCGTCCTTTCCAAGGCCAACTCCGAGGTGGCCCAGTGGAGGACCAAGTATGAGACGGACGCCA | | |
| | TTCAGCGGACTGAGGAGCTCGAGGAGGCCAAGAAGAAGCTGGCCCAGCGGCTGCAGGAAGCTGAGG | | |
| | AGGCCGTGGAGGCTGTTAATGCCAAGTGCTCCTCGCTGGAGAAGACCAAGCACCGGCTACAGAATG | | |
| | AGATCGAGGACTTGATCGTGGACGTAGAGCGCTCCAATGCTGCTGCTGCAGCCCTGGACAAGAAGC | | |
| | AGAGGAACTTCGACAAGATCCTGGCCGAGTGGAAGCAGAAGTATGAGGAGTCGCAGTCGGAGCTGG | | |
| | AGTCCTCGCAGAAGGAGGCTCGCTCCCTCAGCACAGAGCTCTTCAAACTCAAGAACGCCTATGAGG | | |
| | AGTCCCTGGAACATCTGGAGACCTTCAAGCGGGAGAACAAAAACCTGCAGGAGGAGATCTCCGACT | | |
| | TGACTGAGCAGTTGGGTTCCAGCGGAAAGACTATCCATGAGCTGGAGAAGGTCCGAAAGCAGCTGG | | |
| | AGGCCGAGAAGATGGAGCTGCAGTCAGCCCTGGAGGAGGCCGAGGCCTCCCTGGAGCACGAGGAGG | | |
| | GCAAGATCCTCCGGGCCCAGCTGGAGTTCAACCAGATCAAGGCAGAGATCGAGCGGAAGCTGGCAG | | |
| | AGAAGGACGAGGAGATGGAACAGGCCAAGCGCAACCACCTGCGGGTGGTGGACTCGCTGCAGACCT | | |
| | CCCTGGACGCAGAGACACGCAGCCGCAACGAGGCCCTGAGGGTGAAGAAGAAGCAGACAGAGCGGT | | |
| | CCCGGAAGCTGGCGGAGCAGGAGCTGATTGAGACTAGTGAGCGGGTGCAGCTGCTGCATTCCCAGA | | |
| | ACACCAGCCTCATCAACCAGAAGAAGAAGATGGATGCTGACCTGTCCCAGCTCCAGACTGAAGTGG | | |
| | AGGAGGCAGTGCAGGAGTGCAGGAATGCTGAGGAGAAGGCCAAGAAGGCCATCACGGATGCCGCCA | | |
| | TGATGGCAGAGGAGCTGAAGAAGGAGCAGGACACCAGCGCCCACCTGGAGCGCATGAAGAAGAACA | | |
| | TGGAACAGACCATTAACGACCTGCAGCACCGGCTGGACGAAGCCGAGCAGATCGCCCTCAAGGGCG | | |
| | GCAAGAAGCAGCTGCAGAAGCTGGAAGCGCGGGTGCGGGAGCTGGAGAATGAGCTGGAGGCCGAGC | | |
| | AGAAGCGCAACGCAGAGTCGGTGAAGGGCATGAGGAAGAGCGAGCGGCGCATCAAGGAGCTCACCT | | |
| | ACCAGACGGAGGAGGACAGGAAAAACCTGCTCCGGCTGCAGGACCTGGTAGACAAGCTGCAGCTAA | | |
| | AGGTCAAGGCCTACAAGCGCCAGGCCGAGGAGGCGGAGGAGCAAGCCAACACCAACCTGTCCAAGT | | |
| | TCCGCAAGGTGCAGCACGAGCTGGATGAGGCAGAGGAGCGGGCGGACATCGCCGAGTCCCAGGTCA | | |
| | ACAAGCTGCGGGCCAAGAGCCGTGACATTGGCACGAAGGGCTTGAATGAGGAGTAGCTTTGCCACA | | |
| | TCTTGATCTGCTCAGCCCTGGAGGTGCCAGCAAAGCCCCATGCTGGAGCCTGTGTAACAGCTCCTT | | |
| | GGGAGGAAGCAGAATAAAGCAATTTTCCTTGAAGCCGA | | |
| | ORF Start ATG at 87 | | ORF Stop: TAG at 5664 |
| | SEQ ID NO:20 | 1859 aa | MW at 214471.3 kD |
| NOV4c, | MGDSEMAVFGAAAPYLRKSEKERLEAQTRPFDLKKDVFVPDDKQEFVKAKIVSREGGKVTAETEYG | | |
| CG120781-04 | | | |
| Protein Sequence | KTVTVKEDQVMQQNPPKFDKIEDMAMLTFLHEPAVLYNLKDRYGSWMIYTYSGLFCVTVNPYKWLP | | |
| | VYTPEVVAAYRGKKRSEAPPHIFSISDNAYQYMLTDRENQSILITGESGAGKTVNTKRVIQYFAVI | | |
| | AAIGDRSKKDQSFGKGTLEDQIIQANPALEAFGNAKTVRNDNSSRFGKFIRIHFGATGKLASADTE | | |
| | TYLLEKSRVIFQLKAERDYHIFYQILSNKKPELLDMLLITNNPYDYAFISQGETTVASIDDAEELM | | |
| | ATDNAFDVLGFTSEEKISMYKLTCAIMMFGNMKFKLKQREEQAEPDGTEEADKSAYLMGLNSADLL | | |
| | KGLCHPRVKVGNEYVTKGQNVQQVIYATGALAKAVYERMFNWNVTRINATLETKQPRQYFIGVLDI | | |
| | AGFEIFDFNSFEQLCINFTINIEKLQQFNHMFVLEQEEYKKEGIEWTFIDFGMDLQACIDLTEKPM | | |
| | GTMSILEEECMFPKATDMTFKAKLFDNHLCKSANFQKPRNIKGKPEAHFSLIHYAGIVDYNIIGWL | | |
| | QKNKDPLNETVVGLYQKSSLKLLSTLFANYAGADAPIEKGKGKAKKOSSFQTVSALHREITNKLMT | | |
| | NLRSTHPHFVRCTIPNETKSPGVMDNPLVMHQLRCNQVLEGTRICRKGFPNRILYGDFRQRYRTLN | | |
| | PAAIPEGQFTDSRKGAEKLLSSIDIDHNQYKFGHTKVFFKAGLLGLLEEMRDERLSRIITRIQAQS | | |
| | RGVLARMEYKKLLERRDSLLVIQWNIRAFMGVKNWPWNKLYFKIKPLLKSAEREKEMASMKEEFTR | | |
| | LKEALEKSEARRKELEEKMVSLLQEKNILQIQVQAEQDNLADAEERCDQLIKNKIQLEAKVKEMNE | | |
| | RLEDEEEMNAELTAKKRKLEDECSELKRDIDLELTLAICVEKEKHATENKVKNLTEEMAGLDEIIA | | |
| | KLTKEKKALQEAHQQALDDLQAEEDKVNTLTKAKVKLEQQVDDLEGSLEQEKKVRMDLERAKRKLE | | |
| | GDLKLTQESIMDLENDKQQLDERLKKKDEELNALIARIEDEQALGSQLQIHKLKELQARIELEEEL | | |
| | ESERTARAKVEKLRSDLSRELEEISERLEEAGGATSVQIEMNKKREAEFQKMRRDLEEATLQHEAT | | |
| | AAALRKKHADSVAELGEQIDNLQRVKQKLEKEKSEFKLELDDVTSNMEQIIKAKANLEKMCRTLED | | |
| | QMNEHRSKAEETQRSVNDLTSQRAKLQTENGELSRQLDEKEALISQLTRGKLTYTQQLEDLKRQLE | | |
| | EEVKAKNALAHALQSARHDCDLLREQYEEETEAKAELQRVLSKANSEVAQWRTKYETHAIQRTEEL | | |
| | EEAKKKLAQRLQEAEEAVEAVNAKCSSLEKTKHRIQNEIEDLMVDVERSNAAAAALDKKQRNFDKI | | |
| | LAEWKQKYEESQSELESSQKEARSLSTELFKLKNAYEESLEHLETFKRENKNLQEEISDLTEQLGS | | |
| | SGKTIHELEKVRKQLEAEKMELQSALEEAEASLEIHEEGKILRAQLENQIKAEIERKLAEKDEEME | | |
| | QAKRNIILRVVDSLQTSLDAETRSRNEALRVKKQTERSRKLAEQELIETSERVQLLHSQNTSLINQ | | |
| | KKKMDADLSQLQTEVEEAVQECRNAEEKAKKAITDAANMAEELKKEQDTSAILERMKKNMEQTIRD | | |
| | LQHRLDEAEQIALKGGKKQLQKLEARVRELENELEAEQKRNAESVKGMRKSERRIKELTYQTEEDR | | |
| | KNLLRLQDLDVDKQLKVKAYKRQAEEAEEQANTNLSRFRKVQHELDEAEERADIAESQVNKLRAKS | | |
| | RDIGTKGLNEE | | |
| | SEQ NO:21 | 6008 bp | |
| NOV4d, | TGTCTTTCCCTGCTGCTCTCAGGTCCCCTGCAGCCCTTGGCCCCTTTCCTCATCTGTAGACACACT | | |
| CG120781-02 | | | |
| DNA Sequence | TGAGTAGCCCACGCACAGCCATGGGAGATTCGGAGATGGCAGTCTTTGGGGCTGCCGCCCCCTACC | | |
| | TGCGCAAGTCAGAGAAGGAGCGCCTAGAAGCGCAGACCACGCCTTTTGACCTCAAGAAGGATGTCT | | |
| | TCGTGCCTGATGACAAACAGGAGTTTGTCAACGCCAAGATCGTGTCTCGAGAGGGTGGCAAAGTCA | | |
| | CTGCCGAGACTGAGTATGGCAAGACAGTGACCGTGAAGGAGGACCAGGTGATGCAGCAGAACCCAC | | |
| | CCAAGTTCGACAAAATCGAGGACATGGCCATGCTGACCTTCCTGCATGAGCCCGCGGTGCTCTACA | | |
| | ACCTCAAGGATCGCTACGGCTCCTGGATGATCTACACCTACTCGGGCCTCTTCTGTGTCACCGTCA | | |
| | ACCCTTACAAGTGGCTGCCGGTGTACACTCCTGAGGTGGTGGCTGCCTACCGGGGCAAGAAGAGGA | | |
| | GCGAGGCCCCGCCCCACATCTTCTCCATCTCCGACAACGCCTATCAGTACATGCTGACAGACAGAG | | |
| | AAAACCAGTCCATCCTGATCACCGGAGAATCCGGAGCAGGGAAGACAGTCAACACCAAGAGGGTCA | | |
| | TCCAGTACTTTGCTGTTATTGCAGCCATTGGGGACCGCAGCAAGAAGGACCAGAGCCCGGCCAAGG | | |
| | GCACCCTGGAGGACCAGATCATCCAGGCCAACCCTGCTCTGGACGCCTTTGGCAATCCCAAGACCG | | |
| | TCCGGAACGACAACTCCTCCCGCTTCGGGAAATTCATTCCAATTCATTTTGGGGCAACAGGAAAGT | | |
| | TGGCATCTGCAGACATAGAGACCTATCTTCTGGAAAAATCCAGAGTTATTTTCCAGCTGAAAGCAG | | |
| | AGAGAGATTATCACATTTTCTACCAAATCCTGTCTAACAAAAAGCCTGAGCTGCTGGACATGCTGC | | |
| | TGATCACCAACAACCCCTACGATTATGCATTCATCTCCCAAGGAGAGACCACCGTGGCCTCCATTG | | |
| | ATGACGCTGAGGAGCTCATGGCCACTGATAACGCTTTTGATGTGCTGGGCTTCACTTCAGAGGAGA | | |
| | AAAACTCCATGTATAAGCTGACAGGCGCCATCATGCACTTTGGAAACATGAAGTTCAAGCTGAAGC | | |
| | AGCGGGACGAGCACGCCGAGCCAGACCGCACTGAAGAGGCTGACAAGTCTGCCTACCTCATGGGGC | | |
| | TGAACTCAGCCGACCTGCTCAAGGGGCTGTGCCACCCTCGGGTGAAAGTGGGCAATGAGTACGTCA | | |
| | CCAAGGGGCAGAATGTCCAGCAGGTGATATATGCCACTGGGGCACTGGCCAAGGCAGTGTATGAGA | | |
| | GGATGTTCAACTGGATGGTGACGCGCATCAATGCCACCCTGGAGACCAAGCAGCCACGCCAGTACT | | |
| | TCATAGGAGTCCTGGACATCGCTGGCTTCGAGATCTTCGATTTCAACAGCTTTGAGCAGCTCTGCA | | |
| | TCAACTTCACCAACGAGAAGCTGCAGCAGTTCTTCAACCACCACATGTTTGTGCTGGAGCAGGAGG | | |
| | AGTACAAGAAGGAGGGCATCGAGTGGACATTCATTGACTTTGGCATGGACCTGCAGGCCTGCATTG | | |
| | ACCTCATCGAGAAGCCCATGGGCATCATGTCCATCCTGGAAGAGGAGTGCATGTTCCCCAAGGCCA | | |
| | CCGACATGACCTTCAAGGCCAAGCTGTTTGACAACCACCTGGGCAAATCCGCCAACTTCCAGAAGC | | |
| | CACGAAATATCAAGGGGAAGCCTGAAGCCCACTTCTCCCTGATCCACTATGCCGGCATCGTGGACT | | |
| | ACAACATCATTGGCTGGCTGCAGAAGAACAAGGATCCTCTCAATGAGACTGTCGTGGGCTTGTATC | | |
| | AGAAGTCTTCCCTCAAGTTGCTCAGCACCCTGTTTCCCAACTATGCTGGGGCTGATGCGCCTATTG | | |
| | AGAAGGGCAAAGGCAAGGCCAAGAAAGGCTCGTCCTTTCAGACTGTGTCAGCTCTGCACAGGGAAA | | |
| | ATCTGAACAAGCTGATGACCAACTTGCGCTCCACCCATCCCCACTTTGTACGTTGTATCATCCCTA | | |
| | ATGAGACAAAGTCTCCAGGCGTGATGGACAACCCCCTGGTCATGCACCAGCTGCGCTGCAATGGTG | | |
| | TGCTGGAGGGCATCCGCATCTGCAGGAAAGGCTTCCCCAACCGCATCCTCTACGGGGACTTCCGGC | | |
| | AGAGGTATCGCATCCTGAACCCAGCGGCCATCCCTGAGGGACAGTTCATTGATAGCAGGAAGGGGG | | |
| | CAGAGAAGCTGCTCAGCTCCCTGGACATTGATCACAACCAGTACAACTTTGGCCACACCAAGGTGT | | |
| | TCTTCAAGGCCGGGCTGCTGGGGCTGCTGGAGGAAATGAGCGACGAGAGGCTGAGCCGCATCATCA | | |
| | CGCGTATCCAGGCCCAGTCCCGAGGTGTGCTCGCCAGAATGGAGTACAAAAAGCTGCTGGAACGTA | | |
| | GAGACTCCCTGCTGGTAATCCAGTGGAACATTCGGGCCTTCATGGGGGTCAAGAATTCGCCCTCGA | | |
| | TGAAGCTCTACTTCAAGATCAAGCCGCTGCTGAAGAGTGCAGAAAGAGAGAAGGAGATGGCCTCCA | | |
| | TGAAGGAGGAGTTCACACGCCTCAAAGAGGCGCTAGAGAAGTCCGAGGCTCGCCGCAAGGAGCTGG | | |
| | AGGAGAAGATGGTGTCCCTGCTGCAGGAGAAGAATGACCTGCAGCTCCAAGTGCAGGCGGAACAAG | | |
| | ACAACCTGGCAGATGCTGAGGAGCGCTGTGATCAGCTGATCAAAAACAAGATTCAGCTGGAGGCTA | | |
| | AGGTGAAGGAGATGAACGAGAGGCTGGAGGATGACGAGGAGATGAATGCTGAGCTCACTGCCAAGA | | |
| | AGCGCAAGTTGGAAGATGAGTGCTCAGAGCTCAAAAGGGACATCGATGATCTGGAGCTGACACTGG | | |
| | CCAAAGTGGAGAAGGAGAAACACGCAACAGAGAACAAGGTGAAAAACCTGACAGAGGAGATGGCTG | | |
| | CGCTGGATGAGATCATTGCCAAGCTGACCAAGGAGAAGAAAGCTCTGCAAGAGGCCCACCAACAGG | | |
| | CTCTGGATGACCTTCAGGCCGAGGAGGACAAGGTCAACACCCTGACTAAGGCCAAAGTCAAGCTGG | | |
| | AGCAGCAAGTGGATGATCTCGAAGGATCCCTGGAGCAAGAGAAGAAGGTGCGCATGGACCTCGAGC | | |
| | GAGCGAAGCGGAAGCTGGAGGGCGACCTGAAGCTGACCCAGGAGAGCATCATGGACCTGGAGAATG | | |
| | ACAAGCAGCAGCTGGATGAGCGGCTGAAAAAAAAAGACTTTGAGCTGAATGCTCTCAACGCAACGA | | |
| | TTGAGGATGAACAGGCCCTCGGCAGCCAGCTGCAGAAGAAGCTCAAGGAGCTTCAGGCACGCATCG | | |
| | AGGAGCTGGAGGAGGAGCTGGAGTCCGAGCGCACCGCCAGGGCTAAGGTGGAGAAGCTGCGCTCAG | | |
| | ACCTGTCTCGGGAGCTGGAGGAGATCAGCGAGCGGCTCGAAGAGGCCGGCGGGGCCACGTCCGTGC | | |
| | AGATCGAGATGAACAAGAAGCGCGAGGCCGAGTTCCAGAAGATGCGGCGGGACCTGGAGGAGGCCA | | |
| | CGCTGCAGCACGAGGCCACTGCCGCGGCCCTGCGCAAGAAGCACGCCGACAGCGTGGCCGAGCTCG | | |
| | GCGAGCAGATCGACAACCTGCAGCGGGTGAAGCAGAAGCTGCAGAAGGAGAAGAGCGAGTTCAAGC | | |
| | TGGAGCTGGATGACGTCACCTCCAACATGGAGCAGATCATCAAGGCCAAGGCTAACCTGGAGAAGA | | |
| | TGTGCCGGACCTTGGAAGACCAGATGAATGAGCACCGGAGCAAGGCGGAGGAGACCCAGCGTTCTG | | |
| | TCAACGACCTCACCAGCCAGCGGGCCAAGTTGCAAACCGAGAATGGTGAGCTGTCCCGGCAGCTGG | | |
| | ATGAGAAGGAGGCACTGATCTCCCAGCTGACCCGAGGCAAGCTCACCTACACCCAGCAGCTGGAGG | | |
| | ACCTCAAGAGGCAGCTGGAGGAGGAGGTTAAGGCGAAGAACGCCCTGGCCCACGCACTGCAGTCGG | | |
| | CCCGCCATGACTGCGACCTGCTGCGCGAGCAGTACGAGGAGGAGACGGAGGCCAAGGCCGAGCTGC | | |
| | AGCGCGTCCTTTCCAAGGCCAACTCGGAGGTGGCCCAGTGGAGGACCAAGTATGAGACCGACGCCA | | |
| | TTCAGCGGACTGAGGAGCTCGAGGAGGCCAAGAAGAAGCTGGCCCAGCGGCTGCAGGAAGCTGAGG | | |
| | AGGCCGTGGAGGCTGTTAATGCCAAGTGCTCCTCGCTGGAGAAGACCAAGCACCGGCTACAGAATG | | |
| | AGATCGACGACTTGATGGTGGACGTAGAGCGCTCCAATGCTGCTCCTGCAGCCCTGGACAAGAAGC | | |
| | AGAGGAACTTCGACAAGATCCTGGCCGAGTGGAAGCAGAAGTATGAGGAGTCGCAGTCGGAGCTGG | | |
| | AGTCCTCGCAGAAGGAGGCTCGCTCCCTCAGCACAGAGCTCTTCAAACTCAAGAACGCCTATGAGG | | |
| | AGTCCCTGGAACATCTGGAGACCTTCAAGCCGGAGAACAAAAACCTGCAGGAGGAGATCTCCGACT | | |
| | TGACTGAGCAGTTGGGTTCCAGCGGAAAGACTATCCATGAGCTGGAGAAGGTCCGAAAGCAGCTGG | | |
| | AGGCCGAGAAGATGGAGCTGCAGTCAGCCCTGGAGGAGGCCGAGGCCTCCCTGGAGCACGAGGAGG | | |
| | GCAAGATCCTCCGGGCCCAGCTGGAGTTCAACCAGATCAAGGCAGAGATCGAGCGGAAGCTGGCAG | | |
| | AGAAGGACGAGGAGATGGAACAGGCCAAGCGCAACCACCTGCGGGTGGTGGACTCGCTGCAGACCT | | |
| | CCCTGGACGCAGAGACACGCAGCCGCAACGAGGCCCTGAGGGTGAAGAAGAAGATGGAAGGAGACC | | |
| | TCAATGAGATGGAGATCCAGCTCAGCCACGCCAACCGCATGGCCCCCGAGGCCCAGAAGCAAGTCA | | |
| | AGAGCCTCCAGAGCTTGTTGAAGGACACCCAGATTCAGCTGGACGATGCAGTCCGTGCCAACGACG | | |
| | ACCTGAAGGAGAACATCGCCATCGTGGAGCGGCGCAACAACCTGCTGCAGGCTGAGCTCGAGGAGT | | |
| | TGCGTGCCGTMGGGGAGCAGACAGAGCGGTCCCGGAAGCTGGCGGAGCAGGAGCTGATTGAGACTA | | |
| | GTGAGCGGGTGCAGCTGCTGCATTCCCAGAACACCAGCCTCATCAACCAGAAGAAGAAGATGGATG | | |
| | CTGACCTGTCCCAGCTCCACACTGAAGTGGAGGAGGCAGTGCAGGAGTGCAGGAATGCTGACGAGA | | |
| | AGGCCAAGAAGGCCATCACGGATGCCGCCATGATGGCAGACGAGCTGAAGAAGGAGCAGGACACCA | | |
| | GCGCCCACCTGGAGCGCATGAAGAAGAACATGGAACAGACCATTAAGGACCTGCAGCACCGGCTGG | | |
| | ACGAAGCCGAGCAGATCGCCCTCAAGGGCGGCAAGAAGCAGCTGCAGAAGCTGCAAGCGCGGGTGC | | |
| | GGGAGCTGGAGAATGAGCTGGAGGCCGAGCAGAAGCGCAACGCAGAGTCGGTGAAGGGCATGAGGA | | |
| | AGAGCGAGCGGCGCATCAAGGAGCTCACCTACCAGACGGAGGAGGACAGGAAAAACCTGCTGCGGC | | |
| | TGCACGACCTGGTAGACAAGCTGCAGCTAAAGGTCAAGGCCTACAAGCGCCAGGCCGAGGAGGCGG | | |
| | AGGAGCAAGCCAACACCAACCTGTCCAAGTTCCGCAAGGTCCACCACGAGCTGGATGAGGCAGAGG | | |
| | AGCGGGCGGACATCGCCGAGTCCCAGGTCAACAAGCTGCGGGCCAAGAGCCGTGACATTGGCACGA | | |
| | AGGGCTTGAATGAGGAGTAGCTTTGCCACATCTTGATCTGCTCAGCCCTGGAGCTCCCAGCAAAGC | | |
| | CCATGCTGGAGCCTGTGTAACAGCTCCTTGGGAGGAAGCAGAATAAAGCAATTTTCCTTGAAGCC | | |
| | GA | | |
| | ORF Start: ATG at 87 | | ORF Stop: TAG at 5892 |
| | SEQ ID NO:22 | 1935 aa | MW at 223111.0 kD |

| | |
|---|---|
| NOV4d, | MGDSEMAVFGAAPYLRICSEKERLEAQTRPFDLKKDVFVPDDKQEFVKAKIVSREGGKVTAETEYG |
| CG120781-02 | |
| Protein Sequence | KTVTVKEDQVMQQNPPKFDRIEDMAMLTFLHEPAVLYNLKDRYGSWMIYTYSGLFCVTVNPYKWLP |
| | VYTPEVVAAYRGKKRSEAPPHIFSISDNAYQYMLTDRENOSILITGESGAGKTVNTKRVIQYFAVI |
| | AAIGDRSKKDQSPGKGTLEDQIIQANPALEAFGNAKTVRNONSSRFGKFIRIHFGATGKLASADIE |
| | TYLLEKSRVIFQLKAERDYHIFYQILSNKKPELLDMLLITNNPYDYAFISQGETTVASIDDAEELM |
| | ATDNAFDVLGFTSEEKNSMYKLTGAIMHFGINKFKLKQREEQAEPDGTEEADKSAYLMGLNSADLL |
| | KGLCHPRVKVGMEYVTKGQNVQQVIYATGALAKAVYERMFNWMVTRINATLETKQPRQYFIGVLDI |
| | AGFEIFDFNSFEQLCINFTNEKLQQFFNHHMFVLEQEEYKKEGIEWTFIOFGMDLQACIDLIEKPM |
| | GIMSILEEECMPPKATDMTFKAKLFONIILGKSANFQKPRNIKGKPEAHFSLIHYAGIVDYNIGWL |
| | QKNKDPLNETVVGLYQKSSLKLLSTLFANYAGADAPIEKGKGKAKKGSSFQTVSALHRENIMKLMT |
| | NLRSTHPHFVRCIIPNETKSPGVMDNPLVMHQLRCNOVLEGIRICRKGFPNRTLYGGERQRYRILN |
| | PAAIPEGQFIDSRKGAEKLLSSLDIDHNQYKFGHTKVFPKAGLLGLLEEMRDERLSRIITRIQAQS |
| | RGVLARMEYKKLLERRDSLLVIQWNIRAFMGVKNWPWMKLYFKIKPLLKSAEREKEMASMKEEFTR |
| | LKEALEKSEARRKELEEKMVSLLQEKNDLQLQVQAEQDNLADAEERCGQLIKNKTQLEAKVKEMNE |
| | RLEDEEEMNAELTAKKRKLEDECSELKRDIDDLELTLAKVEKEKHATENKVKNLTEEMAGLDEIIA |
| | KLTKEKKALQEAHQQALDDLQAEEDKVNTLTKAKVKLEOQVDDLEGSLEQEKKVRMDLERAKRKLE |
| | GDLKLTQESIMDLENDKQQLDERLKKKDFELNALNARIEDEQALGSQLQKKLKELQARIESLEFEL |
| | ESERTARAKVEKLRSDLSRELEEISERLEEAGGATSVQIEMMKKREAEFQKMRRDLEEATLQHEAT |
| | AAALRKKHADSVAELGEQIDNLQRVKQKLEKEKSEFKLELDDVTSNMEQIIKAKANLEKMCRTLED |
| | QMNEHRSKAEETQRSVNDLTSQRAKLQTENGELSRQLDEKEALISQLTRGKLTYTQQLEDLKRQLE |
| | EEVKAKNALAHALQSARHDCDLLREQYEEETEAKAELQRVLSKANSEVAQWRTKYETDAIQRTEEL |
| | EEAKKKLAQRLQEAEEAVEAVNAKCSSLEKTKHRLQNETEDLMVDVERSNAAAAALDKKORNFDKI |
| | LAEWKQKYEESQSELESSQKEARSLSTELFKLKNAYEESLEHLETFKRENKNLQEEISDLTEQLGS |
| | SGKTIHELEKVRKQLEAEKMELOSALEEAEASLEHEEGKILRAQLEFNQTKAEIERKLAEKDEEME |
| | QAKRNHLRVVDSLQTSLDAETRSRNEALRVKKKMEGDLNEMEIQLSHANRMAAEAQKQVKSLQSLL |
| | KDTQIQLDGAVRANDDLKENIAIVERRNNLLQAELEELRAVVEQTERSRKLAEQELIETSERVQLL |
| | HSQNTSLINQKKKMDADLSQLQTEVEEAVQECRNAEEKAKKAITDAANMAEELKKEQDTSAHLERM |
| | KKNNEQTIKDLQHRLDEAEQIALKGGKKQLQKLEARVRELENELEAEQKRNAESVKGMRKSERRIK |
| | ELTYQTEEDRKNLLRLQDLVDKLQLKVKAYKRQAEEAEEQANTNLSKFRKVQHELDEAEERAIHAE |
| | SQVNKLRAKSRDIGTKGLNEE |

[0376] Sequence comparison of the above protein sequences yields the following sequence relationships shown in Table 4B.

TABLE 4B
Comparison of NOV4a against NOV4b through NOV4d.

| | | Identities/ |
|---|---|---|
| | | Similarities for |
| Protein | NOV4a Residues/ | the Matched |
| Sequence | Match Residues | Region |
| NOV4b | 397 . . . 1137 | 460/741 (62%) |
| | 841 . . . 1524 | 540/741 (72%) |
| NOV4c | 1 . . . 1137 | 1002/1137 (88%) |
| | 799 . . . 1859 | 1026/1137 (90%) |
| NOV4d | 1 . . . 1137 | 1133/1137 (99%) |
| | 799 . . . 1935 | 1137/1137 (99%) |

[0377] Further analysis of the NOV4a protein yielded the following properties shown in Table 4C.

TABLE 4C
Protein Sequence Properties NOV4a

| SignalP analysis: | No Known Signal Sequence Predicted | | | | |
|---|---|---|---|---|---|
| PSORT II analysis: | PSG: | a new signal peptide prediction method | | | |
| | | N-region: | length 11; | pos. chg 4; | neg. chg 3 |
| | | H-region: | length 9; | peak value | 3.86 |
| | | PSG score: | −0.54 | | |

| GvH: | von Heijne's method for signal seq. recognition | |
|---|---|---|
| | GvH score (threshold: −2.1): | −8.01 |
| | possible cleavage site: | between 24 and 25 |

| >>> Seems to have no N-terminal signal peptide | | | | |
|---|---|---|---|---|
| ALOM: | Klein et al's method for TM region allocation | | | |
| | Init position for calculation: 1 | | | |
| | Tentative number of TMS(s) for the threshold 0.5: 0 | | | |
| | number of TMS(s) . . . fixed | | | |
| | PERIPHERAL Likelihood = 8.70 (at 11) | | | |
| | ALOM score: 8.70 (number of TMSs : 0) | | | |
| MITDISC: | discrimination of mitochondrial targeting seq | | | |
| | R content: | 0 | Hyd Moment (75): | 8.33 |
| | Hyd Moment (95): | 7.86 | G content: | 0 |
| | D/E content: | 2 | S/T content: | 0 |
| | Score: | −6.54 | | |

| Gavel: | prediction of cleavage sites for mitochondrial preseq | |
|---|---|---|
| | cleavage site motif not found | |
| NUCDISC: | discrimination of nuclear localization signals | |
| | pat4: | KKRK (5) at 141 |
| | pat4: | RKKH (3) at 395 |
| | pat7: | none |
| | bipartite: | none |
| | content of basic residues: | 18.6% |
| | NLS Score: | 0.03 |

| | |
|---|---|
| KDEL: ER retention motif in the C-terminus: | none |
| ER Membrane Retention Signals: | none |
| SKL: peroxisomal targeting signal in the C-terminus: | none |
| PTS2: 2nd peroxisomal targeting signal: | none |
| VAC: possible vacuolar targeting motif: | none |
| RNA-binding motif: | none |
| Actinin-type actin-binding motif: | |

type 1: none
type 2: none

| | |
|---|---|
| NMYR: N-myristoylation pattern: | none |
| Prenylation motif: | none |
| memYQRL: transport motif from cell surface to Golgi: | none |
| Tyrosines in the tail: | none |
| Dileucine motif in the tail: | none |
| checking 63 PROSITE DNA binding motifs: | |

| | |
|---|---|
| | Leucine zipper pattern (PS00029): *** found *** |
| | LTAKKRKLEDECSELKRDIDDL at 138 |
| | LTEEMAGLDEIIAKLTKEKKAL at 180 |
| none | |

| | |
|---|---|
| checking 71 PROSITE ribosomal protein motifs: | none |
| checking 33 PROSITE prokaryotic DNA binding motifs: | none |

| NNCN: Reinhardt's method for Cytoplasmic/Nuclear | | |
|---|---|---|
| discrimination | | |
| | Prediction: | nuclear |
| | Reliability: | 94.1 |

| | |
|---|---|
| COIL: | Lupas's algorithm to detect coiled-coil regions |
| 40 L | 0.57 |
| 41 L | 0.93 |
| 42 K | 0.97 |
| 43 S | 0.97 |
| 44 A | 0.98 |
| 45 E | 0.99 |
| 46 R | 0.99 |
| 47 E | 1.00 |
| 48 K | 1.00 |
| 49 E | 1.00 |
| 50 M | 1.00 |
| 51 A | 1.00 |
| 52 S | 1.00 |
| 53 M | 1.00 |
| 54 K | 1.00 |
| 55 E | 1.00 |
| 56 E | 1.00 |
| 57 F | 1.00 |
| 58 T | 1.00 |
| 59 R | 1.00 |
| 60 L | 1.00 |
| 61 K | 1.00 |
| 62 E | 1.00 |
| 63 A | 1.00 |
| 64 L | 1.00 |
| 65 E | 1.00 |
| 66 K | 1.00 |
| 67 S | 1.00 |
| 68 E | 1.00 |
| 69 A | 1.00 |
| 70 R | 1.00 |
| 71 R | 1.00 |
| 72 K | 1.00 |
| 73 E | 1.00 |
| 74 L | 1.00 |
| 75 E | 1.00 |
| 76 E | 1.00 |
| 77 K | 1.00 |
| 78 M | 1.00 |
| 79 V | 1.00 |
| 80 S | 1.00 |
| 81 L | 1.00 |
| 82 L | 1.00 |
| 83 Q | 1.00 |
| 84 E | 1.00 |
| 85 K | 1.00 |
| 86 N | 1.00 |
| 87 D | 1.00 |
| 88 L | 1.00 |
| 89 Q | 1.00 |
| 90 L | 1.00 |
| 91 Q | 1.00 |
| 92 V | 1.00 |
| 93 Q | 1.00 |
| 94 A | 1.00 |
| 95 E | 1.00 |
| 96 Q | 1.00 |
| 97 D | 1.00 |
| 98 N | 1.00 |
| 99 L | 1.00 |
| 100 A | 1.00 |
| 101 D | 1.00 |
| 102 A | 1.00 |
| 103 E | 1.00 |
| 104 E | 1.00 |
| 105 R | 1.00 |
| 106 C | 1.00 |
| 107 D | 1.00 |
| 108 Q | 1.00 |
| 109 L | 1.00 |
| 110 I | 1.00 |
| 111 K | 1.00 |
| 112 N | 1.00 |
| 113 K | 1.00 |
| 114 I | 1.00 |
| 115 Q | 1.00 |
| 116 L | 1.00 |
| 117 E | 1.00 |
| 118 A | 1.00 |
| 119 K | 1.00 |
| 120 V | 1.00 |
| 121 K | 1.00 |
| 122 E | 1.00 |
| 123 M | 1.00 |
| 124 N | 1.00 |
| 125 E | 1.00 |
| 126 R | 1.00 |
| 127 L | 1.00 |
| 128 E | 1.00 |
| 129 D | 1.00 |
| 130 E | 1.00 |
| 131 E | 1.00 |
| 132 E | 1.00 |
| 133 M | 1.00 |
| 134 N | 1.00 |
| 135 A | 1.00 |
| 136 E | 1.00 |
| 137 L | 1.00 |
| 138 T | 1.00 |
| 139 A | 1.00 |
| 140 K | 1.00 |
| 141 K | 1.00 |
| 142 R | 1.00 |
| 143 K | 1.00 |
| 144 L | 1.00 |
| 145 E | 1.00 |
| 146 D | 1.00 |
| 147 E | 1.00 |
| 148 C | 1.00 |
| 149 S | 1.00 |
| 150 E | 1.00 |
| 151 L | 1.00 |
| 152 K | 1.00 |
| 153 R | 1.00 |
| 154 D | 1.00 |
| 155 I | 1.00 |
| 156 D | 1.00 |
| 157 D | 1.00 |
| 158 L | 1.00 |
| 159 E | 1.00 |
| 160 L | 1.00 |
| 161 T | 1.00 |
| 162 L | 1.00 |
| 163 A | 1.00 |
| 164 K | 1.00 |
| 165 V | 1.00 |
| 166 E | 1.00 |
| 167 K | 1.00 |
| 168 E | 1.00 |
| 169 K | 1.00 |
| 170 H | 1.00 |
| 171 A | 1.00 |
| 172 T | 1.00 |
| 173 E | 1.00 |
| 174 N | 1.00 |
| 175 K | 1.00 |
| 176 V | 1.00 |
| 177 K | 1.00 |
| 178 N | 1.00 |
| 179 L | 1.00 |
| 180 T | 1.00 |
| 181 E | 1.00 |
| 182 E | 1.00 |
| 183 M | 1.00 |
| 184 A | 1.00 |
| 185 G | 1.00 |
| 186 L | 1.00 |
| 187 D | 1.00 |
| 188 E | 1.00 |
| 189 I | 1.00 |
| 190 I | 1.00 |
| 191 A | 1.00 |
| 192 K | 1.00 |
| 193 L | 1.00 |
| 194 T | 1.00 |
| 195 K | 1.00 |
| 196 E | 1.00 |
| 197 K | 1.00 |
| 198 K | 1.00 |
| 199 A | 1.00 |
| 200 L | 1.00 |
| 201 Q | 1.00 |
| 202 E | 1.00 |
| 203 A | 1.00 |
| 204 H | 1.00 |
| 205 Q | 1.00 |
| 206 Q | 1.00 |
| 207 A | 1.00 |
| 208 L | 1.00 |
| 209 D | 1.00 |
| 210 D | 1.00 |
| 211 L | 1.00 |
| 212 Q | 1.00 |
| 213 A | 1.00 |
| 214 E | 1.00 |
| 215 E | 1.00 |
| 216 D | 1.00 |
| 217 K | 1.00 |
| 218 V | 1.00 |
| 219 N | 1.00 |
| 220 T | 1.00 |
| 221 L | 1.00 |
| 222 T | 1.00 |
| 223 K | 1.00 |
| 224 A | 1.00 |
| 225 K | 1.00 |
| 226 V | 1.00 |
| 227 K | 1.00 |
| 228 L | 1.00 |
| 229 E | 1.00 |
| 230 Q | 1.00 |
| 231 Q | 1.00 |
| 232 V | 1.00 |
| 233 D | 1.00 |
| 234 D | 1.00 |
| 235 L | 1.00 |
| 236 E | 1.00 |
| 237 G | 1.00 |
| 238 S | 1.00 |
| 239 L | 1.00 |
| 240 E | 1.00 |
| 241 Q | 1.00 |
| 242 E | 1.00 |
| 243 K | 1.00 |
| 244 K | 1.00 |
| 245 V | 1.00 |
| 246 R | 1.00 |
| 247 M | 1.00 |
| 248 D | 1.00 |
| 249 L | 1.00 |
| 250 E | 1.00 |
| 251 R | 1.00 |
| 252 A | 1.00 |
| 253 K | 1.00 |
| 254 R | 1.00 |
| 255 K | 1.00 |
| 256 L | 1.00 |
| 257 E | 1.00 |
| 258 G | 1.00 |
| 259 D | 1.00 |
| 260 L | 1.00 |
| 261 K | 1.00 |
| 262 L | 1.00 |
| 263 T | 1.00 |
| 264 Q | 1.00 |
| 265 E | 1.00 |
| 266 S | 1.00 |
| 267 I | 1.00 |
| 268 M | 1.00 |
| 269 D | 1.00 |
| 270 L | 1.00 |
| 271 E | 1.00 |
| 272 N | 1.00 |
| 273 D | 1.00 |
| 274 K | 1.00 |
| 275 Q | 1.00 |
| 276 Q | 1.00 |
| 277 L | 1.00 |
| 278 E | 1.00 |
| 279 E | 1.00 |
| 280 R | 1.00 |
| 281 L | 1.00 |
| 282 K | 1.00 |
| 283 K | 1.00 |
| 284 K | 1.00 |
| 285 D | 1.00 |
| 286 F | 1.00 |
| 287 E | 1.00 |
| 288 L | 1.00 |
| 289 N | 1.00 |
| 290 A | 1.00 |
| 291 L | 1.00 |
| 292 N | 1.00 |
| 293 A | 1.00 |
| 294 R | 1.00 |
| 295 I | 1.00 |
| 296 E | 1.00 |
| 297 D | 1.00 |
| 298 E | 1.00 |
| 299 Q | 1.00 |
| 300 A | 1.00 |
| 301 L | 1.00 |
| 302 G | 1.00 |
| 303 S | 1.00 |
| 304 Q | 1.00 |
| 305 L | 1.00 |
| 306 Q | 1.00 |
| 307 K | 1.00 |
| 308 K | 1.00 |
| 309 L | 1.00 |
| 310 K | 1.00 |
| 311 E | 1.00 |
| 312 L | 1.00 |
| 313 Q | 1.00 |
| 314 A | 1.00 |
| 315 R | 1.00 |
| 316 I | 1.00 |
| 317 E | 1.00 |
| 318 E | 1.00 |
| 319 L | 1.00 |
| 320 E | 1.00 |
| 321 E | 1.00 |
| 322 E | 1.00 |
| 323 L | 1.00 |
| 324 E | 1.00 |
| 325 A | 1.00 |
| 326 E | 1.00 |
| 327 R | 1.00 |
| 328 T | 1.00 |
| 329 A | 1.00 |
| 330 R | 1.00 |
| 331 A | 1.00 |
| 332 K | 1.00 |
| 333 V | 1.00 |
| 334 E | 1.00 |
| 335 K | 1.00 |
| 336 L | 1.00 |
| 337 R | 1.00 |
| 338 S | 1.00 |
| 339 D | 1.00 |
| 340 L | 1.00 |
| 341 S | 1.00 |
| 342 R | 1.00 |
| 343 E | 1.00 |
| 344 L | 1.00 |
| 345 E | 1.00 |
| 346 E | 1.00 |
| 347 I | 1.00 |
| 348 S | 0.99 |
| 349 E | 0.99 |
| 350 R | 0.99 |
| 351 L | 0.99 |
| 352 E | 0.99 |
| 353 E | 0.99 |
| 354 A | 0.99 |
| 355 G | 0.96 |
| 356 G | 0.91 |
| 357 A | 0.91 |
| 358 T | 0.72 |
| 359 S | 0.50 |
| 369 E | 0.65 |
| 370 A | 0.65 |
| 371 E | 0.65 |
| 372 F | 0.65 |
| 373 Q | 0.65 |
| 374 K | 0.65 |
| 375 M | 0.65 |
| 376 R | 0.65 |
| 377 R | 0.65 |
| 378 D | 0.65 |
| 379 L | 0.65 |
| 380 E | 0.65 |
| 381 E | 0.65 |
| 382 A | 0.65 |
| 383 T | 0.65 |
| 384 L | 0.65 |
| 385 Q | 0.65 |
| 386 H | 0.65 |
| 387 E | 0.65 |
| 388 A | 0.65 |
| 389 T | 0.65 |
| 390 A | 0.65 |
| 391 A | 0.72 |
| 392 A | 0.95 |
| 393 L | 0.97 |
| 394 R | 1.00 |
| 395 K | 1.00 |
| 396 K | 1.00 |
| 397 H | 1.00 |
| 398 A | 1.00 |
| 399 D | 1.00 |
| 400 S | 1.00 |
| 401 V | 1.00 |
| 402 A | 1.00 |
| 403 E | 1.00 |
| 404 L | 1.00 |
| 405 G | 1.00 |
| 406 E | 1.00 |
| 407 Q | 1.00 |
| 408 I | 1.00 |
| 409 D | 1.00 |
| 410 N | 1.00 |
| 411 L | 1.00 |
| 412 Q | 1.00 |
| 413 R | 1.00 |
| 414 V | 1.00 |
| 415 K | 1.00 |
| 416 Q | 1.00 |
| 417 K | 1.00 |
| 418 L | 1.00 |
| 419 E | 1.00 |
| 420 K | 1.00 |
| 421 E | 1.00 |
| 422 K | 1.00 |
| 423 S | 1.00 |
| 424 E | 1.00 |
| 425 F | 1.00 |
| 426 K | 1.00 |
| 427 L | 1.00 |
| 428 E | 1.00 |
| 429 L | 1.00 |
| 430 D | 1.00 |
| 431 D | 1.00 |
| 432 V | 1.00 |
| 433 T | 1.00 |
| 434 S | 1.00 |
| 435 N | 1.00 |
| 436 M | 1.00 |
| 437 E | 1.00 |
| 438 Q | 1.00 |
| 439 I | 1.00 |
| 440 I | 1.00 |
| 441 K | 1.00 |
| 442 A | 1.00 |
| 443 K | 1.00 |
| 444 A | 1.00 |
| 445 N | 1.00 |
| 446 L | 1.00 |
| 447 E | 1.00 |
| 448 K | 1.00 |
| 449 M | 1.00 |
| 450 C | 1.00 |
| 451 R | 1.00 |
| 452 T | 1.00 |
| 453 L | 1.00 |
| 454 E | 1.00 |
| 455 D | 1.00 |
| 456 Q | 1.00 |
| 457 M | 1.00 |
| 458 N | 1.00 |
| 459 E | 1.00 |
| 460 H | 1.00 |
| 461 R | 1.00 |
| 462 S | 1.00 |
| 463 K | 1.00 |
| 464 A | 1.00 |
| 465 E | 1.00 |
| 466 E | 1.00 |
| 467 T | 1.00 |
| 468 Q | 1.00 |
| 469 R | 1.00 |
| 470 S | 1.00 |
| 471 V | 1.00 |
| 472 N | 1.00 |
| 473 D | 1.00 |
| 474 L | 1.00 |
| 475 T | 1.00 |
| 476 S | 1.00 |
| 477 Q | 1.00 |
| 478 R | 1.00 |
| 479 A | 1.00 |
| 480 K | 1.00 |
| 481 L | 1.00 |
| 482 Q | 1.00 |
| 483 T | 1.00 |
| 484 E | 1.00 |
| 485 N | 1.00 |
| 486 G | 1.00 |
| 487 E | 1.00 |
| 488 L | 1.00 |
| 489 S | 1.00 |
| 490 R | 1.00 |
| 491 Q | 1.00 |
| 492 L | 1.00 |
| 493 D | 0.99 |
| 494 E | 0.99 |
| 495 K | 0.99 |
| 496 E | 0.99 |
| 497 A | 0.99 |
| 498 L | 0.99 |
| 499 I | 0.99 |
| 500 S | 0.99 |
| 501 Q | 0.99 |
| 502 L | 0.99 |
| 503 T | 0.99 |
| 504 R | 0.99 |
| 505 G | 0.99 |
| 506 K | 0.99 |
| 507 L | 0.99 |
| 508 T | 0.99 |
| 509 Y | 1.00 |
| 510 T | 1.00 |
| 511 Q | 1.00 |
| 512 Q | 1.00 |
| 513 L | 1.00 |
| 514 E | 1.00 |
| 515 D | 1.00 |
| 516 L | 1.00 |
| 517 K | 1.00 |
| 518 R | 1.00 |
| 519 Q | 1.00 |
| 520 L | 1.00 |
| 521 E | 1.00 |
| 522 E | 1.00 |
| 523 E | 1.00 |
| 524 V | 1.00 |
| 525 K | 1.00 |
| 526 A | 1.00 |
| 527 K | 1.00 |
| 528 N | 1.00 |
| 529 A | 1.00 |
| 530 L | 1.00 |
| 531 A | 1.00 |
| 532 H | 1.00 |
| 533 A | 1.00 |
| 534 L | 1.00 |
| 535 Q | 1.00 |
| 536 S | 1.00 |
| 537 A | 1.00 |
| 538 R | 1.00 |
| 539 H | 1.00 |
| 540 D | 1.00 |
| 541 C | 1.00 |
| 542 D | 1.00 |
| 543 L | 1.00 |
| 544 L | 1.00 |
| 545 R | 1.00 |
| 546 E | 1.00 |
| 547 Q | 1.00 |
| 548 Y | 1.00 |
| 549 E | 1.00 |
| 550 E | 1.00 |
| 551 E | 1.00 |
| 552 T | 1.00 |
| 553 E | 1.00 |
| 554 A | 1.00 |
| 555 K | 1.00 |
| 556 A | 1.00 |
| 557 E | 1.00 |
| 558 L | 1.00 |
| 559 Q | 1.00 |
| 560 R | 1.00 |
| 561 V | 1.00 |
| 562 L | 1.00 |
| 563 S | 1.00 |
| 564 K | 1.00 |
| 565 A | 1.00 |
| 566 N | 1.00 |
| 567 S | 1.00 |
| 568 E | 1.00 |
| 569 V | 1.00 |
| 570 A | 1.00 |
| 571 Q | 1.00 |
| 572 W | 1.00 |
| 573 R | 1.00 |
| 574 T | 0.99 |
| 575 K | 0.99 |
| 576 Y | 0.99 |
| 577 E | 1.00 |
| 578 T | 1.00 |
| 579 D | 1.00 |
| 580 A | 1.00 |
| 581 I | 1.00 |
| 582 Q | 1.00 |
| 583 R | 1.00 |
| 584 T | 1.00 |
| 585 E | 1.00 |
| 586 E | 1.00 |
| 587 L | 1.00 |
| 588 E | 1.00 |
| 589 E | 1.00 |
| 590 A | 1.00 |
| 591 K | 1.00 |
| 592 K | 1.00 |
| 593 K | 1.00 |
| 594 L | 1.00 |
| 595 A | 1.00 |
| 596 Q | 1.00 |
| 597 R | 1.00 |
| 598 L | 1.00 |
| 599 Q | 1.00 |
| 600 E | 1.00 |
| 601 A | 1.00 |
| 602 E | 1.00 |
| 603 E | 1.00 |
| 604 A | 1.00 |
| 605 V | 1.00 |
| 606 E | 1.00 |
| 607 A | 1.00 |
| 608 V | 1.00 |
| 609 N | 1.00 |
| 610 A | 1.00 |
| 611 K | 1.00 |
| 612 C | 1.00 |
| 613 S | 1.00 |
| 614 S | 1.00 |
| 615 L | 1.00 |
| 616 E | 1.00 |
| 617 K | 1.00 |
| 618 T | 1.00 |
| 619 K | 1.00 |
| 620 H | 1.00 |
| 621 R | 1.00 |
| 622 L | 1.00 |
| 623 Q | 1.00 |
| 624 N | 1.00 |
| 625 E | 1.00 |
| 626 I | 1.00 |
| 627 E | 1.00 |
| 628 D | 1.00 |
| 629 L | 1.00 |
| 630 M | 1.00 |
| 631 V | 0.99 |
| 632 D | 0.99 |
| 633 V | 0.99 |
| 634 E | 0.99 |
| 635 R | 0.99 |
| 636 S | 0.98 |
| 637 N | 0.98 |
| 638 A | 0.98 |
| 639 A | 0.98 |
| 640 A | 0.98 |
| 641 A | 0.98 |
| 642 A | 0.98 |
| 643 L | 0.98 |
| 644 D | 0.97 |
| 645 K | 0.97 |
| 646 K | 0.97 |
| 647 Q | 0.95 |
| 648 R | 0.97 |
| 649 N | 0.97 |
| 650 F | 0.97 |
| 651 D | 1.00 |
| 652 K | 1.00 |
| 653 I | 1.00 |
| 654 L | 1.00 |
| 655 A | 1.00 |
| 656 E | 1.00 |
| 657 W | 1.00 |
| 658 K | 1.00 |
| 659 Q | 1.00 |
| 660 K | 1.00 |
| 661 Y | 1.00 |
| 662 E | 1.00 |
| 663 E | 1.00 |
| 664 S | 1.00 |
| 665 Q | 1.00 |
| 666 S | 1.00 |
| 667 E | 1.00 |
| 668 L | 1.00 |
| 669 E | 1.00 |
| 670 S | 1.00 |
| 671 S | 1.00 |
| 672 Q | 1.00 |
| 673 K | 1.00 |
| 674 E | 1.00 |
| 675 A | 1.00 |
| 676 R | 1.00 |
| 677 S | 1.00 |
| 678 L | 1.00 |
| 679 S | 1.00 |
| 680 T | 1.00 |
| 681 E | 1.00 |
| 682 L | 1.00 |
| 683 F | 0.99 |
| 684 K | 1.00 |
| 685 L | 1.00 |
| 686 K | 1.00 |
| 687 N | 1.00 |
| 688 A | 1.00 |
| 689 Y | 1.00 |
| 690 E | 1.00 |
| 691 E | 1.00 |
| 692 S | 1.00 |
| 693 L | 1.00 |
| 694 E | 1.00 |
| 695 H | 1.00 |
| 696 L | 1.00 |
| 697 E | 1.00 |
| 698 T | 1.00 |
| 699 F | 1.00 |
| 700 K | 1.00 |
| 701 R | 1.00 |
| 702 E | 1.00 |
| 703 N | 1.00 |
| 704 K | 1.00 |
| 705 N | 1.00 |
| 706 L | 1.00 |
| 707 Q | 1.00 |
| 708 E | 1.00 |
| 709 E | 1.00 |
| 710 I | 1.00 |
| 711 S | 1.00 |
| 712 D | 1.00 |
| 713 L | 1.00 |
| 714 T | 1.00 |
| 715 E | 1.00 |
| 716 Q | 1.00 |
| 717 L | 1.00 |
| 718 G | 0.99 |
| 719 S | 0.99 |
| 720 S | 0.99 |
| 721 G | 1.00 |
| 722 K | 1.00 |
| 723 T | 1.00 |
| 724 I | 1.00 |
| 725 H | 1.00 |
| 726 E | 1.00 |
| 127 L | 1.00 |
| 728 E | 1.00 |
| 729 K | 1.00 |
| 730 V | 1.00 |
| 731 R | 1.00 |
| 732 K | 1.00 |
| 733 Q | 1.00 |
| 734 L | 1.00 |
| 735 E | 1.00 |
| 736 A | 1.00 |
| 737 E | 1.00 |
| 738 K | 1.00 |
| 739 M | 1.00 |
| 740 E | 1.00 |
| 741 L | 1.00 |
| 742 Q | 1.00 |
| 743 S | 1.00 |
| 744 A | 1.00 |
| 745 L | 1.00 |
| 746 E | 1.00 |
| 747 E | 1.00 |
| 748 A | 1.00 |
| 749 E | 1.00 |
| 750 A | 1.00 |
| 751 S | 1.00 |
| 752 L | 1.00 |
| 753 E | 1.00 |
| 754 H | 1.00 |
| 755 E | 1.00 |
| 756 E | 1.00 |
| 757 G | 1.00 |
| 758 K | 1.00 |
| 759 I | 1.00 |
| 760 L | 1.00 |
| 761 R | 1.00 |
| 762 A | 1.00 |
| 763 Q | 1.00 |
| 764 L | 1.00 |
| 765 E | 1.00 |
| 766 F | 1.00 |
| 767 N | 1.00 |
| 768 Q | 1.00 |
| 769 I | 1.00 |
| 770 K | 1.00 |
| 771 A | 1.00 |
| 772 E | 1.00 |
| 773 I | 1.00 |
| 774 E | 1.00 |
| 775 R | 0.99 |
| 776 K | 0.98 |
| 111 L | 0.98 |
| 778 A | 0.98 |
| 779 E | 0.98 |
| 780 K | 0.98 |
| 781 D | 0.98 |
| 782 E | 0.98 |
| 783 E | 0.98 |
| 784 M | 0.98 |
| 785 E | 0.98 |
| 786 Q | 0.98 |
| 787 A | 0.98 |
| 788 K | 0.98 |
| 789 R | 0.98 |
| 790 N | 0.98 |
| 791 H | 0.98 |
| 792 L | 0.98 |
| 793 R | 0.96 |
| 794 V | 0.96 |
| 795 V | 0.93 |
| 796 D | 0.93 |
| 797 S | 0.93 |
| 798 L | 0.93 |
| 799 Q | 0.93 |
| 800 T | 0.93 |
| 801 S | 0.93 |
| 802 L | 0.96 |
| 803 D | 0.96 |
| 804 A | 0.96 |
| 805 E | 0.96 |
| 806 T | 0.96 |
| 807 R | 0.96 |
| 808 S | 0.96 |
| 809 R | 0.96 |
| 810 N | 0.98 |
| 811 E | 0.98 |
| 812 A | 0.98 |
| 813 L | 0.98 |
| 814 R | 1.00 |
| 815 V | 1.00 |
| 816 K | 1.00 |
| 817 K | 1.00 |
| 818 K | 1.00 |
| 819 M | 1.00 |
| 820 E | 1.00 |
| 821 G | 1.00 |
| 822 D | 1.00 |
| 823 L | 1.00 |
| 824 N | 1.00 |
| 825 E | 1.00 |
| 826 M | 1.00 |
| 827 E | 1.00 |
| 828 I | 1.00 |
| 829 Q | 1.00 |
| 830 L | 1.00 |
| 831 S | 1.00 |
| 832 H | 1.00 |
| 833 A | 1.00 |
| 834 N | 1.00 |
| 835 R | 1.00 |
| 836 M | 1.00 |
| 837 A | 1.00 |
| 838 A | 1.00 |
| 839 E | 1.00 |
| 840 A | 1.00 |
| 841 Q | 1.00 |
| 842 K | 1.00 |
| 843 Q | 1.00 |
| 844 V | 1.00 |
| 845 K | 1.00 |
| 846 S | 1.00 |
| 847 L | 1.00 |
| 848 Q | 1.00 |
| 849 S | 1.00 |
| 850 L | 1.00 |
| 851 L | 1.00 |
| 852 K | 1.00 |
| 853 D | 1.00 |
| 854 T | 1.00 |
| 855 Q | 1.00 |
| 856 I | 1.00 |
| 857 Q | 1.00 |
| 858 L | 1.00 |
| 859 D | 1.00 |
| 860 D | 1.00 |
| 861 A | 1.00 |
| 862 V | 1.00 |
| 863 R | 1.00 |
| 864 A | 1.00 |
| 865 N | 1.00 |
| 866 D | 1.00 |
| 867 D | 1.00 |
| 868 L | 1.00 |
| 869 K | 1.00 |
| 870 E | 1.00 |
| 871 N | 1.00 |
| 872 I | 1.00 |
| 873 A | 1.00 |
| 874 I | 1.00 |
| 875 V | 1.00 |
| 876 E | 1.00 |
| 877 R | 1.00 |
| 878 R | 1.00 |
| 879 N | 1.00 |
| 880 N | 1.00 |
| 881 L | 1.00 |
| 882 L | 1.00 |
| 883 Q | 1.00 |
| 884 A | 1.00 |
| 885 E | 1.00 |
| 886 L | 1.00 |
| 887 E | 1.00 |
| 888 E | 1.00 |
| 889 L | 1.00 |
| 890 R | 1.00 |
| 891 A | 1.00 |
| 892 V | 1.00 |
| 893 V | 1.00 |
| 894 E | 1.00 |
| 895 Q | 1.00 |
| 896 T | 1.00 |
| 897 E | 1.00 |
| 898 R | 1.00 |
| 899 S | 1.00 |
| 900 R | 1.00 |
| 901 K | 1.00 |
| 902 L | 1.00 |
| 903 A | 1.00 |
| 904 D | 1.00 |
| 905 E | 1.00 |
| 906 E | 1.00 |
| 907 L | 1.00 |
| 908 I | 1.00 |
| 909 E | 1.00 |
| 910 T | 0.98 |
| 911 S | 0.95 |
| 912 E | 0.95 |
| 913 R | 0.92 |
| 914 V | 0.90 |
| 915 Q | 0.90 |
| 916 L | 0.90 |
| 917 L | 0.99 |
| 918 H | 0.99 |
| 919 S | 0.99 |
| 920 Q | 0.99 |
| 921 N | 0.99 |
| 922 T | 0.99 |
| 923 S | 0.99 |
| 924 L | 1.00 |
| 925 I | 1.00 |
| 926 N | 1.00 |
| 927 Q | 1.00 |
| 928 K | 1.00 |
| 929 K | 1.00 |
| 930 K | 1.00 |
| 931 M | 1.00 |
| 932 D | 1.00 |
| 933 A | 1.00 |
| 934 D | 1.00 |
| 935 L | 1.00 |
| 936 S | 1.00 |
| 937 Q | 1.00 |
| 938 L | 1.00 |
| 939 Q | 1.00 |
| 940 T | 1.00 |
| 941 E | 1.00 |
| 942 V | 1.00 |
| 943 E | 1.00 |
| 944 E | 1.00 |
| 945 A | 1.00 |
| 946 V | 1.00 |
| 947 Q | 1.00 |
| 948 E | 1.00 |
| 949 C | 1.00 |
| 950 R | 1.00 |
| 951 N | 1.00 |
| 952 A | 1.00 |
| 953 E | 1.00 |
| 954 E | 1.00 |
| 955 K | 1.00 |
| 956 A | 1.00 |
| 957 K | 1.00 |
| 958 K | 1.00 |
| 959 A | 1.00 |
| 960 I | 1.00 |
| 961 T | 1.00 |
| 962 D | 1.00 |
| 963 A | 1.00 |
| 964 A | 1.00 |
| 965 M | 1.00 |
| 966 M | 1.00 |
| 967 A | 1.00 |
| 968 E | 1.00 |
| 969 E | 1.00 |
| 970 L | 1.00 |
| 971 K | 1.00 |
| 972 K | 1.00 |
| 973 E | 1.00 |
| 974 Q | 1.00 |
| 975 D | 1.00 |
| 976 T | 1.00 |
| 977 S | 1.00 |
| 978 A | 1.00 |
| 979 H | 1.00 |
| 980 L | 1.00 |
| 981 E | 1.00 |
| 982 R | 1.00 |
| 983 M | 1.00 |
| 984 K | 1.00 |
| 985 K | 1.00 |
| 986 N | 1.00 |
| 987 M | 1.00 |
| 988 E | 1.00 |
| 989 Q | 1.00 |
| 990 T | 1.00 |
| 991 I | 1.00 |
| 992 K | 1.00 |
| 993 D | 1.00 |
| 994 L | 1.00 |
| 995 Q | 1.00 |
| 996 H | 1.00 |
| 997 R | 1.00 |
| 998 L | 1.00 |
| 999 D | 1.00 |
| 1000 E | 1.00 |
| 1001 A | 1.00 |
| 1002 E | 1.00 |
| 1003 Q | 1.00 |
| 1004 I | 1.00 |
| 1005 A | 1.00 |
| 1006 L | 1.00 |
| 1007 K | 1.00 |
| 1008 G | 1.00 |
| 1009 G | 1.00 |
| 1010 K | 1.00 |
| 1011 K | 1.00 |
| 1012 Q | 1.00 |
| 1013 L | 1.00 |
| 1014 Q | 1.00 |
| 1015 K | 1.00 |
| 1016 L | 1.00 |
| 1017 E | 1.00 |
| 1018 A | 1.00 |
| 1019 R | 1.00 |
| 1020 V | 1.00 |
| 1021 R | 1.00 |
| 1022 E | 1.00 |
| 1023 L | 1.00 |
| 1024 E | 1.00 |
| 1025 N | 1.00 |
| 1026 E | 1.00 |
| 1027 L | 1.00 |
| 1028 E | 1.00 |
| 1029 A | 1.00 |
| 1030 E | 1.00 |
| 1031 Q | 1.00 |
| 1032 K | 1.00 |
| 1033 R | 1.00 |
| 1034 N | 1.00 |
| 1035 A | 1.00 |
| 1036 E | 1.00 |
| 1037 S | 1.00 |
| 1038 V | 1.00 |
| 1039 K | 1.00 |
| 1040 G | 1.00 |
| 1041 M | 1.00 |
| 1042 R | 1.00 |
| 1043 K | 1.00 |
| 1044 S | 1.00 |
| 1045 E | 1.00 |
| 1046 R | 1.00 |
| 1047 R | 1.00 |
| 1048 I | 1.00 |
| 1049 K | 1.00 |
| 1050 E | 1.00 |
| 1051 L | 1.00 |
| 1052 T | 0.99 |
| 1053 Y | 0.99 |
| 1054 Q | 0.99 |
| 1055 T | 0.99 |
| 1056 E | 1.00 |
| 1057 E | 1.00 |
| 1058 D | 1.00 |
| 1059 R | 1.00 |
| 1060 K | 1.00 |
| 1061 N | 1.00 |
| 1062 L | 1.00 |
| 1063 L | 1.00 |
| 1064 R | 1.00 |
| 1065 L | 1.00 |
| 1066 Q | 1.00 |
| 1067 D | 1.00 |
| 1068 L | 1.00 |
| 1069 V | 1.00 |
| 1070 D | 1.00 |
| 1071 K | 1.00 |
| 1072 L | 1.00 |
| 1073 Q | 1.00 |
| 1074 L | 1.00 |
| 1075 K | 1.00 |
| 1076 V | 1.00 |
| 1077 K | 1.00 |
| 1078 A | 1.00 |
| 1079 Y | 1.00 |
| 1080 K | 1.00 |
| 1081 R | 1.00 |
| 1082 Q | 1.00 |
| 1083 A | 1.00 |
| 1084 E | 1.00 |
| 1085 E | 1.00 |
| 1086 A | 1.00 |
| 1087 E | 1.00 |
| 1088 E | 1.00 |
| 1089 Q | 1.00 |
| 1090 A | 1.00 |
| 1091 N | 1.00 |
| 1092 T | 1.00 |
| 1093 N | 1.00 |
| 1094 L | 1.00 |
| 1095 S | 1.00 |
| 1096 K | 1.00 |
| 1097 F | 1.00 |
| 1098 R | 1.00 |
| 1099 K | 1.00 |
| 1100 V | 1.00 |
| 1101 Q | 1.00 |
| 1102 H | 1.00 |
| 1103 E | 1.00 |
| 1104 L | 1.00 |
| 1105 D | 1.00 |
| 1106 E | 1.00 |
| 1107 A | 1.00 |
| 1108 E | 1.00 |
| 1109 E | 1.00 |
| 1110 R | 1.00 |
| 1111 A | 1.00 |
| 1112 D | 1.00 |
| 1113 I | 1.00 |
| 1114 A | 1.00 |
| 1115 E | 1.00 |
| 1116 S | 1.00 |
| 1117 Q | 1.00 |
| 1118 V | 1.00 |
| 1119 N | 1.00 |
| 1120 K | 1.00 |
| 1121 L | 1.00 |
| 1122 R | 1.00 |
| 1123 A | 1.00 |
| 1124 K | 1.00 |
| 1125 S | 1.00 |
| 1126 R | 1.00 |
| 1127 D | 1.00 |
| 1128 I | 1.00 |
| 1129 G | 1.00 |
| 1130 T | 1.00 |
| 1131 K | 1.00 |
| 1132 G | 0.85 |
| total: | 1084 residues |

| Final Results (k = 9/23): | | |
|---|---|---|
| | 65.2%: | nuclear |
| | 21.7%: | cytoplasmic |
| | 4.3%: | cytoskeletal |
| | 4.3%: | mitochondrial |
| | 4.3%: | peroxisomal |

>> prediction for CG120781-01 is nuc (k = 23)

[0378] A search of the NOV4a protein against the Geneseq database, a proprietary database that contains sequences published in patents and patent publication, yielded several homologous proteins shown in Table 4D.

TABLE 4D
Geneseq Results for NOV4a

| | | | Identities/ | |
|---|---|---|---|---|
| | | | Similarities for | |
| Geneseq | Protein/Organism/Length | NOV4a Residues/ | the Matched | Expect |
| Identifier | [Patent #, Date] | Match Residues | Region | Value |
| ABG31649 | Amino acid distribution analysis | 1 . . . 1137 | 1122/1137 (98%) | 0.0 |
| | method associated protein - | 799 . . . 1935 | 1127/1137 (98%) | |
| | Unidentified, 1935 aa. | | | |
| | [JP2002215635-A, 2 AUG. 2002] | | | |
| ABB77096 | Human alpha-myosin heavy chain - | 1 . . . 1132 | 1071/1132 (94%) | 0.0 |
| | Homo sapiens, 1939 aa. | 801 . . . 1932 | 1106/1132 (97%) | |
| | [US6358751-B1, 19 MAR. 2002] | | | |
| AAW54241 | Rattus norvegicus mutant | 1 . . . 1132 | 1063/1132 (93%) | 0.0 |
| | alpha-myosin heavy chain - Rattus | 748 . . . 1879 | 1104/1132 (96%) | |
| | norvegicus, 1886 aa. | | | |
| | [WO9813476-A1, 2 APR. 1998] | | | |
| ABG21233 | Novel human diagnostic protein | 1 . . . 1137 | 906/1143 (79%) | 0.0 |
| | #21224 - Homo sapiens, 1948 aa. | 806 . . . 1948 | 1039/1143 (90%) | |
| | [WO200175067-A2, 11 OCT. 2001] | | | |
| ABG79661 | Invertebrate foraging behaviour | 1 . . . 1128 | 885/1128 (78%) | 0.0 |
| | associated human protein #5 - Homo | 800 . . . 1927 | 1027/1128 (90%) | |
| | sapiens, 1940 aa. | | | |
| | [WO200259370-A2, 1 AUG. 2002] | | | |

[0379] In a BLAST search of public sequence databases, the NOV4a protein was found to have homology to the proteins shown in the BLASTP data in Table 4E.

TABLE 4E
Public BLASTP Results for NOV4a

| | | | Identities/ | |
|---|---|---|---|---|
| Protein | | | Similarities for | |
| Accession | | NOV4a Residues/ | the Matched | Expect |
| Number | Protein/Organism/Length | Match Residues | Portion | Value |
| P12883 | Myosin heavy chain, cardiac muscle | 1 . . . 1137 | 1133/1137 (99%) | 0.0 |
| | beta isoform (MyHC-beta) - Homo | 799 . . . 1935 | 1137/1137 (99%) | |
| | sapiens (Human), 1935 aa. | | | |
| Q9H1D5 | Beta-myosin heavy chain - Homo | 1 . . . 1137 | 1133/1137 (99%) | 0.0 |
| | sapiens (Human), 1935 aa. | 799 . . . 1935 | 1136/1137 (99%) | |
| Q8MJU9 | Myosin heavy chain slow - Equus | 1 . . . 1137 | 1121/1137 (98%) | 0.0 |
| | caballus (Horse), 1935 aa. | 799 . . . 1935 | 1132/1137 (98%) | |
| Q9GKR1 | Myosin heavy chain slow isoform - | 1 . . . 1137 | 1122/1137 (98%) | 0.0 |
| | Sus scrofa (Pig), 1935 aa. | 799 . . . 1935 | 1132/1137 (98%) | |
| Q91Z83 | Beta myosin heavy chain - Mus | 1 . . . 1137 | 1118/1137 (98%) | 0.0 |
| | musculus (Mouse), 1935 aa. | 799 . . . 1935 | 1132/1137 (99%) | |

[0380] PFam analysis predicts that the NOV4a protein contains the domains shown in the Table 4F.

TABLE 4F
Domain Analysis of NOV4a

| | | Identities/ | |
|---|---|---|---|
| | | Similarities for | |
| Pfam | NOV4a | the Matched | Expect |
| Domain | Match Region | Region | Value |
| Myosin_tail | 211 . . . 268 | 21/58 (36%) | 0.69 |
| | | 38/58 (66%) | |
| Myosin_tail | 270 . . . 1129 | 531/864 (61%) | 0 |
| | | 812/864 (94%) | |

### Example 5.

[0381] The NOV5 clone was analyzed, and the nucleotide and encoded polypeptide sequences are shown in Table 5A.

TABLE 5A
NOV5 Sequence Analysis

| | SEQ ID NO:23 | 3657 bp | |
|---|---|---|---|
| NOV5a, | GAGTCCCAGCCCCACGCCGGCTACCACCATGGCGGAGACCAACAACGAATGTAGCATCAAGGTGCT | | |
| CG122634-01 | | | |
| DNA Sequence | CTGCCGATTCCGGCCCCTGAACCAGGCTGAGATTCTCCCGGGAGACAAGTTCATCCCCATTTTCCA | | |
| | AGCGGACGACAGCGTCGTTATTGGGGGGAAGCCATATGTTTTTGACCGTGTATTCCCCCCAAACAC | | |
| | GACTCAAGAGCAAGTTTATCATGCATGTGCCATGCAGATTGTCAAAGATGTCCTTGCTGGCTACAA | | |
| | TGCCACCATTTTTGCTTATGGACAGACATCCTCAGGGAAAACACATACCATGGACGGAAAGCTGCA | | |
| | CGACCCTCAGCTGATGGGAATCATTCCTCGAATTGCCCGAGACATCTTCAACCACATCTACTCCAT | | |
| | GGATGAGAACCTTGAGTTCCACATCAAGGTTTCTTACTTTGAAATTTACCTGGACAAAATTCGTGA | | |
| | CCTTCTGGATGTCACCAAGACAAATCTGTCCGTGCACGAGGACAAGAACCGGGTGCCATTTGTCAA | | |
| | GGGTTGTACTGAACGCTTTGTGTCCAGCCCGGAGGAGATTCTGGATGTGATTGATGAAGGGAAATC | | |
| | AAATCGTCATGTGGCTGTCACCAACATGAATGAACACAGCTCTCGGAGCCACACCATCTTCCTCAT | | |
| | AACATCAAGCAGGAGAACATGGAAACGGAGCAGAAGCTCAAATGCGAAGCTGTATCTGGTGGACCT | | |
| | GGCAGGGAGTGAGAAGGTCAGCAAGACTGGAGCACAGGGAGCCGTGCTGGACGAGGCAAAGAATAT | | |
| | CAACAAGTCACTGTCAGCTCTGCGCAATGTGATCTCCGCACTGGCTGAGGGCACTAAAAGCTATGT | | |
| | TCCATATCGTGACAGCAAAATGACAAGGATTCTCCAGGACTCTCTCGGGGGAAACTGCCGGACGAC | | |
| | TATGTTCATCTGTTGCTCACCATCCAGTTATAATGATGCAGAGACCAAGTCCACCCTGATCTTTCG | | |
| | GCAGCGGGCAAAGACCATTAAGAACACTGCCTCAGTAAATTTCGAGTTGACTGCTGAGCAGTGGAA | | |
| | GAAGAAATATGAGAAGGAGAAGGAGAAGACAAAGGCCCAGAAGGAGACGATTGCGAAGCTGGAGGC | | |
| | TGAGCTGAGCCGGTGGCGCAATGGACAGAATGTGCCTGAGACAGAGCGCCTGGCTGAGGAGGAGGC | | |
| | AGCCCTGGGAGCCGAGCTCTGTGAGGAGACCCCTGTGAATGACAACTCATCCATCGTGGTGCGCAT | | |
| | CGCGCCCGAGGAGCGGCAGAAATACGAGGAGCAGATCCGCCGTCTCTATAAGCAGCTTGACGACAA | | |
| | GGATGATGAAATCAACCAACAAAGCCAACTCATAGAGAAGCTCAAGCAGCAAATGCTGGACCAGGA | | |
| | AGAGCTGCTGGTGTCCACCCGAGGAGACAACGAGAAGGTCCAGCGGGAGCTGAGCCACCTGCAATC | | |
| | AGAGAACGATGCCGCTAAGGATGAGGTGAAGGAAGTGCTGCACGCCCTGGAGGAGCTGGCTGTGAA | | |
| | CTATGACCAGAAGTCCCACGAGGTGGAGGAGAAGAGCCAGCAGAACCAGCTTCTGGTGGATGAGCT | | |
| | GTCTCAGAACGTGGCCACCATGCTGTCCCTGGAGTCTGAGTTGCAGCGGCTACAGGAGGTCAGTGG | | |
| | ACACCAGCGAAAACGAATTGCTGAGGTGCTGAACGGGCTGATGAAGGATCTGAGCGAGTTCAGTGT | | |
| | CATTGTGGGCAACGGGGAGATTAAGCTGCCAGTGGAGATCAGTGGGGCCATCCAGGAGGACTTCAC | | |
| | TGTGCCCCGACTCTACATCAGCAAAATCAAATCAGAAGTCAAGTCTGTGGTCAAGCGGTGCCGGCA | | |
| | GCTGGAGAACCTCCACGTGGAGTGTCACCGCAAGATGGAAGTGACCGGGCGGGAGCTCTCATCCTG | | |
| | CCAGCTCCTCATCTCTCAGCATGAGGCCAAGATCCGCTCGCTTACGGAATACATGCAGAGCGTGGA | | |
| | GCTAAAGAAGCCGCACCTGGAAGAGTCCTATGACTCCTTGAGCGATGAGCTGGCCAAGCTCCAGGC | | |
| | CCAGGAAACTGTGCATGAAGTGGCCCTGAAGGACAAGGAGCCTGACACTCAGGATGCAGATGAAGT | | |
| | GAAGAAGGCTCTGGAGCTGCAGATCGAGAGTCACCGGGAGGCCCATCACCCGCAGCTGGCCCGGCT | | |
| | CCGGGACGAGATCAACGAGAAGCAGAAGACCATTGATGAGCTCAAAGACCTAAATCAGAAGCTCCA | | |
| | GTTAGAGCTAGAGAAGCTTCAGGCTGACTACGAGAAGCTGAAGAGCGAAGAACACGAGAAGAGCAC | | |
| | CAAGCTGCACGAGCTGACATTTCTGTACGAGCGACATGAGCAGTCCAAGCAGGACCTCAAGGGTCT | | |
| | GGAGGAGACAGTTGCCCGGGAACTCCAGACCCTCCACAACCTTCGCAAGCTGTTCGTTCAAGACGT | | |
| | CACGACTCGAGTCAACAAAAGTGCAGAAATGGAGCCCGAAGACAGTGGGGGGATTCACTCCCAAAA | | |
| | GCAGAAGATTTCCTTTCTTGAGAACAACCTGGAACAGCTTACAAAGGTTCACAAACACCTGGTACG | | |
| | TGACAATGCAGATCTGCGTTGTGAGCTTCCTAAATTGGAAAAACGACTTAGGGCTACGGCTGACAG | | |
| | AGTTAAGGCCCTGGAGGGTGCACTGAAGGAGGCCGTTCGCTACAAGAGCTCGGGCAAACGGGGCCA | | |
| | TTCTGCCCAGATTGCCAAACCCGTCCGGCCTGGCCACTACCCAGCATCCTCACCCACCAACCCCTA | | |
| | TGGCACCCGGAGCCCTGAGTGCATCAGTTACACCAACAGCCTCTTCCAGAACTACCAGAATCTCTA | | |
| | CCTGCAGGCCACACCCAGCTCCACCTCAGATATGTACTTTGCAAACTCCTGTACCAGCAGTGGAGC | | |
| | ACATCTTCTGGCGGCCCCTTGGCTTCCTACCAGAAGGCCAACATCGGACAATGGAAATGCCACAGA | | |
| | TATCAATGACAATAGGAGTGACCTGCCGTGTGGCTATGAGGCTGAGGACCAGGCCAAGCTTTTCCC | | |
| | TCTCCACCAAGAGACAGCAGCCAGCTAATCTCCCACACCCACGGCTGCATACCTGCACTTTCAGTT | | |
| | TCTAAGAGGGACTGAGGCCTCTTCTCAGCATGCTGCAAACCTGTGGTCTCTGATACTAACTCCCTC | | |
| | CCCAACCCCTGTTGTTGGACTGTACTATGTTTGATGTCTTCTCTTACTTACTCTGTATCTCTTTGT | | |
| | ACTCTGTATCTATATATCAAAAGCTGCTCCTATGTCTCTCTTCTGTCTTATTCTCAAGTATCTACT | | |
| | GATGTATTTAGCAATTTCAAAGCATAGTCTACCTTCCTTATTTGGGGCAATAGGGAGGAGGGTGAA | | |
| | TGTTTCTTCTTTCTCATCTACTCGTCTCACACTGAGTGGTGTTAGTCACTGAGTAGAGGTCACAGA | | |
| | GATGACAAAACGAAAAATGGGAGCTAGAGGGTTGTGACCCTTCATACACACACGCACACACGCACA | | |
| | CAAACATGCACACACGCATGCACACACACAAAGCCTTAAGCAGAAGAATGTCTTAGCATCATGAGA | | |
| | CGAGAAATAGACTCTTCCTCCCTCCTCTTTCACATATAGCACAGAACGTAAAATGGAAGGGCTGCT | | |
| | AATTGAGACATATAATTTTCGGAATTC | | |
| | ORF Start: ATG at 29 | | ORF Stop: TAA at 3062 |
| | SEQ ID NO:24 | 1011 aa | MW at 114816.1 kD |

| | |
|---|---|
| NOV5a, | MAETNNECSIKVLCRFRPLNQAEILRGOKPIPIFQGDDSVVIGGKPYVFDRVFPPNTTQEQVYHAC |
| CG122634-01 | |
| Protein Sequence | AMQIVKDVLAGYNGTIFAYGQTSSGKTHTMECKLHDPQLMGIIPRIARDIFIHIYSMDENLEFHIK |
| | VSYFEIYLDKIRDLLDVTKTNLSVHEDKNRVPFVKGCTERFVSSPREILDVIDEGKSNRHVAVTNM |
| | NEHSSRSHSIFLINIKQENMETEQKLSGKLYLVDLAGSEKVSKTGAEGAVLDEAKMINKSLSALCN |
| | VISALAEGTKSYVPYRDSKMTRILQDSLGGNCRTTMFICCSPSSYNDAETKSTLMFGQRAKTIKNT |
| | ASVNLELTAEQWKKKYEKEKEKTKAQKETIAKLEAELSRWRNGEWVPETERLAGEEAALGAELCEE |
| | TPVNDNSSIVVRIAPEERQKYEEEIRRLYKQLDDKDDEINQQSQLIEKLKQQMLDQEELLVSTRGD |
| | NEKVQRELSHLQSENDAAKDEVKEVLQALEELAVNYDQKSQEVEEKSQQNQLLVDELSQKVATMLS |
| | LESELQRLQEVSGHQRKRIAEVLNGLMKDLSEFSVIVGMGEIKLPVEISGAIEEEFTVARLYISRI |
| | KSEVKSVVKRCRQLENLQVECHRKMEVTGRELSSCQLLISQHEAKIRSLTEYMQSVELKKRHLEES |
| | YDSLSDELAKLQAQETVHEVALKDKEPDTQDADEVRKALELQMESHREAHHRQLARLRDEINEKQR |
| | TIDELKDLNQKLQLELEKLQADYEKLKSEEHEKSTKLQELTFLYERHEQSKQDLKGLEETVARELQ |
| | TLHNLRKLFVQDVTTRVKKSAEMEPEDSGGIHSQKQKISFLENNLEQLTKVHRQLVRDNADLRCEL |
| | PKLEKRLRATAERVKALEGALKEAVRYKSSGKRGHSAQIAKPVRPGHYPASSPTRPYGTRSPECIS |
| | YTNSLFQNYQNLYLGATPSSTSDMYFANSCTSSGATSSGGPLASYQRANMDNGNATDINDNRSDLP |
| | GYEAEDQAKLFPLHQETAAS |

[0382] Further analysis of the NOV5a protein yielded the following properties shown in Table 5B.

TABLE 5B
Protein Sequence Properties NOV5a

| SignalP analysis: | No Known Signal Sequence Predicted | | | |
|---|---|---|---|---|
| PSORT II analysis: | PSG: a new signal peptide prediction method | | | |
| | N-region: length 11; pos. chg 1; neg. chg 2 | | | |
| | H-region: length 3; peak value 0.00 | | | |
| | PSG score: −4.40 | | | |
| | GvH: von Heijne's method for signal seq. recognition | | | |
| | GvH score (threshold: −2.1): −6.86 | | | |
| | possible cleavage site: between 21 and 22 | | | |
| | >>> Seems to have no N-terminal signal peptide | | | |
| | ALOM: Klein et al's method for TM region allocation | | | |
| | Init position for calculation: 1 | | | |
| | Tentative number of TMS(s) for the threshold 0.5: 0 | | | |
| | number of TMS(s) . . . fixed | | | |
| | PERIPHERAL Likelihood = 5.57 (at 550) | | | |
| | ALOM score: 5.57 (number of TMSs: 0) | | | |
| | MITDISC: discrimination of mitochondrial targeting seq | | | |
| | R content: | 0 | Hyd Moment(75): | 4.81 |
| | Hyd Moment(95): | 8.50 | G content: | 0 |
| | D/E content: | 2 | S/T content: | 1 |
| | Score: −6.65 | | | |
| | Gavel: prediction of cleavage sites for mitochondrial preseq | | | |
| | cleavage site motif not found | | | |
| | NUCDISC: discrimination of nuclear localization signals | | | |
| | pat4: KKRH (3) at 653 | | | |
| | pat7: none | | | |
| | bipartite: none | | | |
| | content of basic residues: 13.7% | | | |
| | NLS Score: −0.29 | | | |
| | KDEL: ER retention motif in the C-terminus: none | | | |
| | ER Membrane Retention Signals: none | | | |
| | SKL: peroxisomal targeting signal in the C-terminus: none | | | |
| | PTS2: 2nd peroxisomal targeting signal: none | | | |
| | VAC: possible vacuolar targeting motif: none | | | |
| | RNA-binding motif: none | | | |
| | Actinin-type actin-binding motif: | | | |
| | type 1: none | | | |
| | type 2: none | | | |
| | NMYR: N-myristoylation pattern: none | | | |
| | Prenylation motif: none | | | |
| | memYQRL: transport motif from cell surface to Golgi: none | | | |
| | Tyrosines in the tail: none | | | |
| | Dileucine motif in the tail: none | | | |
| | checking 63 PROSITE DNA binding motifs: | | | |
| | Leucine zipper pattern (PS00029): *** found *** | | | |
| | LKDLNQKLQLELEKLQADYEKL at 731 | | | |
| | LENNLEQLTKVHKQLVRDNADL at 833 | | | |
| | none | | | |
| | checking 71 PROSITE ribosomal protein motifs: none | | | |
| | checking 33 PROSITE prokaryotic DNA binding motifs: none | | | |
| | NNCN: Reinhardt's method for Cytoplasmic/Nuclear | | | |
| | discrimination | | | |
| | Prediction: nuclear | | | |
| | Reliability: 89 | | | |
| | COIL: Lupas's algorithm to detect coiled-coil regions | | | |
| | 330 A | 0.63 | | |
| | 331 S | 0.63 | | |
| | 332 V | 0.90 | | |
| | 333 N | 0.97 | | |
| | 334 L | 0.98 | | |
| | 335 E | 0.98 | | |
| | 336 L | 0.98 | | |
| | 337 T | 0.99 | | |
| | 338 A | 1.00 | | |
| | 339 E | 1.00 | | |
| | 340 Q | 1.00 | | |
| | 341 W | 1.00 | | |
| | 342 K | 1.00 | | |
| | 343 K | 1.00 | | |
| | 344 K | 1.00 | | |
| | 345 Y | 1.00 | | |
| | 346 E | 1.00 | | |
| | 347 K | 1.00 | | |
| | 348 E | 1.00 | | |
| | 349 K | 1.00 | | |
| | 350 E | 1.00 | | |
| | 351 K | 1.00 | | |
| | 352 T | 1.00 | | |
| | 353 K | 1.00 | | |
| | 354 A | 1.00 | | |
| | 355 Q | 1.00 | | |
| | 356 K | 1.00 | | |
| | 357 E | 1.00 | | |
| | 358 T | 1.00 | | |
| | 359 I | 1.00 | | |
| | 360 A | 1.00 | | |
| | 361 K | 1.00 | | |
| | 362 L | 1.00 | | |
| | 363 E | 1.00 | | |
| | 364 A | 1.00 | | |
| | 365 E | 1.00 | | |
| | 366 L | 1.00 | | |
| | 367 S | 1.00 | | |
| | 368 R | 0.99 | | |
| | 369 W | 0.99 | | |
| | 370 R | 0.99 | | |
| | 371 N | 0.99 | | |
| | 372 G | 0.87 | | |
| | 373 E | 0.55 | | |
| | 411 E | 0.99 | | |
| | 412 E | 0.99 | | |
| | 413 R | 0.99 | | |
| | 414 Q | 0.99 | | |
| | 415 K | 0.99 | | |
| | 416 Y | 0.99 | | |
| | 417 E | 1.00 | | |
| | 418 E | 1.00 | | |
| | 419 E | 1.00 | | |
| | 420 I | 1.00 | | |
| | 421 R | 1.00 | | |
| | 422 R | 1.00 | | |
| | 423 L | 1.00 | | |
| | 424 Y | 1.00 | | |
| | 425 K | 1.00 | | |
| | 426 Q | 1.00 | | |
| | 427 L | 1.00 | | |
| | 428 D | 1.00 | | |
| | 429 D | 1.00 | | |
| | 430 K | 1.00 | | |
| | 431 D | 1.00 | | |
| | 432 D | 1.00 | | |
| | 433 E | 1.00 | | |
| | 434 I | 1.00 | | |
| | 435 N | 1.00 | | |
| | 436 Q | 1.00 | | |
| | 437 Q | 1.00 | | |
| | 438 S | 1.00 | | |
| | 439 Q | 1.00 | | |
| | 440 L | 1.00 | | |
| | 441 I | 1.00 | | |
| | 442 E | 1.00 | | |
| | 443 K | 1.00 | | |
| | 444 L | 1.00 | | |
| | 445 K | 0.99 | | |
| | 446 Q | 0.99 | | |
| | 447 Q | 0.99 | | |
| | 448 M | 0.99 | | |
| | 449 L | 0.99 | | |
| | 450 D | 0.99 | | |
| | 451 Q | 0.99 | | |
| | 452 E | 0.99 | | |
| | 453 E | 0.99 | | |
| | 454 L | 0.98 | | |
| | 455 L | 0.98 | | |
| | 456 V | 0.98 | | |
| | 457 S | 0.99 | | |
| | 458 T | 1.00 | | |
| | 459 R | 1.00 | | |
| | 460 G | 1.00 | | |
| | 461 D | 1.00 | | |
| | 462 N | 1.00 | | |
| | 463 E | 1.00 | | |
| | 464 K | 1.00 | | |
| | 465 V | 1.00 | | |
| | 466 Q | 1.00 | | |
| | 467 R | 1.00 | | |
| | 468 E | 1.00 | | |
| | 469 L | 1.00 | | |
| | 470 S | 1.00 | | |
| | 471 H | 1.00 | | |
| | 472 L | 1.00 | | |
| | 473 Q | 1.00 | | |
| | 474 S | 1.00 | | |
| | 475 E | 1.00 | | |
| | 476 N | 1.00 | | |
| | 477 D | 1.00 | | |
| | 478 A | 1.00 | | |
| | 479 A | 1.00 | | |
| | 480 K | 1.00 | | |
| | 481 D | 1.00 | | |
| | 482 E | 1.00 | | |
| | 483 V | 1.00 | | |
| | 484 K | 1.00 | | |
| | 485 E | 1.00 | | |
| | 486 V | 1.00 | | |
| | 487 L | 1.00 | | |
| | 488 Q | 1.00 | | |
| | 489 A | 1.00 | | |
| | 490 L | 1.00 | | |
| | 491 E | 1.00 | | |
| | 492 E | 1.00 | | |
| | 493 L | 1.00 | | |
| | 494 A | 1.00 | | |
| | 495 V | 1.00 | | |
| | 496 N | 1.00 | | |
| | 497 Y | 1.00 | | |
| | 498 D | 1.00 | | |
| | 499 Q | 1.00 | | |
| | 500 K | 1.00 | | |
| | 501 S | 1.00 | | |
| | 502 Q | 1.00 | | |
| | 503 E | 1.00 | | |
| | 504 V | 1.00 | | |
| | 505 E | 1.00 | | |
| | 506 E | 1.00 | | |
| | 507 K | 1.00 | | |
| | 508 S | 0.99 | | |
| | 509 Q | 0.99 | | |
| | 510 Q | 0.97 | | |
| | 511 N | 0.65 | | |
| | 512 Q | 0.65 | | |
| | 513 L | 0.59 | | |
| | 514 L | 0.59 | | |
| | 515 V | 0.59 | | |
| | 516 D | 0.59 | | |
| | 517 E | 0.59 | | |
| | 518 L | 0.59 | | |
| | 519 S | 0.59 | | |
| | 520 Q | 0.59 | | |
| | 521 K | 0.59 | | |
| | 522 V | 0.59 | | |
| | 523 A | 0.59 | | |
| | 524 T | 0.61 | | |
| | 525 M | 0.61 | | |
| | 526 L | 0.61 | | |
| | 527 S | 0.61 | | |
| | 528 L | 0.61 | | |
| | 529 E | 0.61 | | |
| | 530 S | 0.61 | | |
| | 531 E | 0.61 | | |
| | 532 L | 0.61 | | |
| | 533 Q | 0.61 | | |
| | 534 R | 0.61 | | |
| | 535 L | 0.61 | | |
| | 536 Q | 0.61 | | |
| | 537 E | 0.61 | | |
| | 538 V | 0.61 | | |
| | 539 S | 0.61 | | |
| | 540 G | 0.61 | | |
| | 541 H | 0.61 | | |
| | 542 Q | 0.61 | | |
| | 543 R | 0.61 | | |
| | 544 K | 0.61 | | |
| | 545 R | 0.61 | | |
| | 546 I | 0.61 | | |
| | 547 A | 0.61 | | |
| | 548 E | 0.61 | | |
| | 549 V | 0.61 | | |
| | 550 L | 0.61 | | |
| | 551 N | 0.61 | | |
| | 552 G | 0.53 | | |
| | 553 L | 0.53 | | |
| | 554 M | 0.53 | | |
| | 555 K | 0.53 | | |
| | 629 Q | 0.62 | | |
| | 630 L | 0.78 | | |
| | 631 L | 0.95 | | |
| | 632 I | 0.96 | | |
| | 633 S | 0.96 | | |
| | 634 Q | 0.98 | | |
| | 635 H | 0.98 | | |
| | 636 E | 1.00 | | |
| | 637 A | 1.00 | | |
| | 638 K | 1.00 | | |
| | 639 I | 1.00 | | |
| | 640 R | 1.00 | | |
| | 641 S | 1.00 | | |
| | 642 L | 1.00 | | |
| | 643 T | 1.00 | | |
| | 644 E | 1.00 | | |
| | 645 Y | 1.00 | | |
| | 646 M | 1.00 | | |
| | 647 Q | 1.00 | | |
| | 648 S | 1.00 | | |
| | 649 V | 1.00 | | |
| | 650 E | 1.00 | | |
| | 651 L | 1.00 | | |
| | 652 K | 1.00 | | |
| | 653 K | 1.00 | | |
| | 654 R | 1.00 | | |
| | 655 H | 1.00 | | |
| | 656 L | 1.00 | | |
| | 657 E | 1.00 | | |
| | 658 E | 1.00 | | |
| | 659 S | 1.00 | | |
| | 660 Y | 1.00 | | |
| | 661 D | 1.00 | | |
| | 662 S | 1.00 | | |
| | 663 L | 1.00 | | |
| | 664 S | 1.00 | | |
| | 665 D | 1.00 | | |
| | 666 E | 1.00 | | |
| | 667 L | 1.00 | | |
| | 668 A | 1.00 | | |
| | 669 K | 1.00 | | |
| | 670 L | 1.00 | | |
| | 671 Q | 1.00 | | |
| | 672 A | 1.00 | | |
| | 673 Q | 1.00 | | |
| | 674 E | 1.00 | | |
| | 675 T | 0.99 | | |
| | 676 V | 0.99 | | |
| | 677 H | 0.99 | | |
| | 678 E | 0.99 | | |
| | 679 V | 0.99 | | |
| | 680 A | 0.99 | | |
| | 681 L | 0.99 | | |
| | 682 K | 0.99 | | |
| | 683 D | 0.99 | | |
| | 684 K | 0.75 | | |
| | 685 E | 0.75 | | |
| | 701 Q | 0.85 | | |
| | 702 M | 0.91 | | |
| | 703 E | 0.97 | | |
| | 704 S | 0.97 | | |
| | 705 H | 0.97 | | |
| | 706 R | 0.98 | | |
| | 707 E | 0.98 | | |
| | 708 A | 0.98 | | |
| | 709 H | 0.98 | | |
| | 710 H | 1.00 | | |
| | 711 R | 1.00 | | |
| | 712 Q | 1.00 | | |
| | 713 L | 1.00 | | |
| | 714 A | 1.00 | | |
| | 715 R | 1.00 | | |
| | 716 L | 1.00 | | |
| | 717 R | 1.00 | | |
| | 718 D | 1.00 | | |
| | 719 E | 1.00 | | |
| | 720 I | 1.00 | | |
| | 721 N | 1.00 | | |
| | 722 E | 1.00 | | |
| | 723 K | 1.00 | | |
| | 724 Q | 1.00 | | |
| | 725 K | 1.00 | | |
| | 726 T | 1.00 | | |
| | 727 I | 1.00 | | |
| | 728 D | 1.00 | | |
| | 729 E | 1.00 | | |
| | 730 L | 1.00 | | |
| | 731 K | 1.00 | | |
| | 732 D | 1.00 | | |
| | 733 L | 1.00 | | |
| | 734 N | 1.00 | | |
| | 735 Q | 1.00 | | |
| | 736 K | 1.00 | | |
| | 737 L | 1.00 | | |
| | 738 Q | 1.00 | | |
| | 739 L | 1.00 | | |
| | 740 E | 1.00 | | |
| | 741 L | 1.00 | | |
| | 742 E | 1.00 | | |
| | 743 K | 1.00 | | |
| | 744 L | 1.00 | | |
| | 745 Q | 1.00 | | |
| | 746 A | 1.00 | | |
| | 747 D | 1.00 | | |
| | 748 Y | 1.00 | | |
| | 749 E | 1.00 | | |
| | 750 K | 1.00 | | |
| | 751 L | 1.00 | | |
| | 752 K | 1.00 | | |
| | 753 S | 1.00 | | |
| | 754 E | 1.00 | | |
| | 755 E | 1.00 | | |
| | 756 H | 1.00 | | |
| | 757 E | 1.00 | | |
| | 758 K | 1.00 | | |
| | 759 S | 1.00 | | |
| | 760 T | 1.00 | | |
| | 761 K | 1.00 | | |
| | 762 L | 1.00 | | |
| | 763 Q | 1.00 | | |
| | 764 E | 1.00 | | |
| | 765 L | 1.00 | | |
| | 766 T | 0.99 | | |
| | 767 F | 0.93 | | |
| | 768 L | 0.77 | | |
| | 769 Y | 0.77 | | |
| | 770 E | 0.89 | | |
| | 771 R | 0.89 | | |
| | 772 H | 0.89 | | |
| | 773 E | 0.89 | | |
| | 774 Q | 0.89 | | |
| | 775 S | 0.89 | | |
| | 776 K | 0.89 | | |
| | 777 Q | 0.89 | | |
| | 778 D | 0.89 | | |
| | 779 L | 0.89 | | |
| | 780 K | 0.89 | | |
| | 781 G | 0.89 | | |
| | 782 L | 0.89 | | |
| | 783 E | 0.89 | | |
| | 784 E | 0.89 | | |
| | 785 T | 0.89 | | |
| | 786 V | 0.89 | | |
| | 787 A | 0.89 | | |
| | 788 R | 0.89 | | |
| | 789 E | 0.89 | | |
| | 790 L | 0.89 | | |
| | 791 Q | 0.89 | | |
| | 792 T | 0.89 | | |
| | 793 L | 0.89 | | |
| | 794 H | 0.89 | | |
| | 795 N | 0.89 | | |
| | 796 L | 0.89 | | |
| | 797 R | 0.89 | | |
| | 798 K | 0.86 | | |
| | 799 L | 0.72 | | |
| | 800 F | 0.72 | | |
| | 821 G | 0.51 | | |
| | 822 I | 0.91 | | |
| | 823 H | 0.91 | | |
| | 824 S | 0.95 | | |
| | 825 Q | 0.98 | | |
| | 826 K | 1.00 | | |
| | 827 Q | 1.00 | | |
| | 828 K | 1.00 | | |
| | 829 I | 1.00 | | |
| | 830 S | 1.00 | | |
| | 831 F | 1.00 | | |
| | 832 L | 1.00 | | |
| | 833 E | 1.00 | | |
| | 834 N | 1.00 | | |
| | 835 N | 1.00 | | |
| | 836 L | 1.00 | | |
| | 837 E | 1.00 | | |
| | 838 Q | 1.00 | | |
| | 839 L | 1.00 | | |
| | 840 T | 1.00 | | |
| | 841 K | 1.00 | | |
| | 842 V | 1.00 | | |
| | 843 H | 1.00 | | |
| | 844 K | 1.00 | | |
| | 845 Q | 1.00 | | |
| | 846 L | 1.00 | | |
| | 847 V | 1.00 | | |
| | 848 R | 1.00 | | |
| | 849 D | 1.00 | | |
| | 850 N | 1.00 | | |
| | 851 A | 1.00 | | |
| | 852 D | 1.00 | | |
| | 853 L | 1.00 | | |
| | 854 R | 1.00 | | |
| | 855 C | 0.96 | | |
| | 856 E | 0.96 | | |
| | 857 L | 0.96 | | |
| | 858 P | 0.92 | | |
| | 859 K | 0.95 | | |
| | 860 L | 0.95 | | |
| | 861 E | 0.95 | | |
| | 862 K | 0.95 | | |
| | 863 R | 0.95 | | |
| | 864 L | 0.95 | | |
| | 865 R | 0.95 | | |
| | 866 A | 0.95 | | |
| | 867 T | 0.95 | | |
| | 868 A | 0.95 | | |
| | 869 E | 0.95 | | |
| | 870 R | 0.95 | | |
| | 871 V | 0.95 | | |
| | 872 K | 0.95 | | |
| | 873 A | 0.95 | | |
| | 874 L | 0.95 | | |
| | 875 E | 0.95 | | |
| | 876 G | 0.95 | | |
| | 877 A | 0.95 | | |
| | 878 L | 0.95 | | |
| | 879 K | 0.95 | | |
| | 880 E | 0.95 | | |
| | 881 A | 0.95 | | |
| | 882 V | 0.95 | | |
| | 883 R | 0.95 | | |
| | 884 Y | 0.95 | | |
| | 885 K | 0.95 | | |
| | 886 S | 0.95 | | |
| | 887 S | 0.91 | | |

```
total: 413 residues
Final Results (k = 9/23):
60.9%: nuclear
26.1%: cytoplasmic
  8.7%: peroxisomal
  4.3%: cytoskeletal
>> prediction for CG122634-01 is nuc (k = 23)
```

[0383] A search of the NOV5a protein against the Geneseq database, a proprietary database that contains sequences published in patents and patent publication, yielded several homologous proteins shown in Table 5C.

TABLE 5C
Geneseq Results for NOV5a

| | | | Identities/ | |
|---|---|---|---|---|
| | | | Similarities for | |
| Geneseq | Protein/Organism/Length | NOV5a Residues/ | the Matched | Expect |
| Identifier | [Patent #, Date] | Match Residues | Region | Value |
| AAM78880 | Human protein SEQ ID NO 1542 - | 7 . . . 918 | 661/939 (70%) | 0.0 |
| | Homo sapiens, 963 aa. | 6 . . . 941 | 787/939 (83%) | |
| | [WO200157190-A2, 9 AUG. 2001] | | | |
| AAM79864 | Human protein SEQ ID NO 3510 - | 7 . . . 918 | 654/940 (69%) | 0.0 |
| | Homo sapiens, 979 aa. | 21 . . . 957 | 780/940 (82%) | |
| | [WO200157190-A2, 9 AUG. 2001] | | | |
| ABB63485 | Drosophila melanogaster polypeptide | 7 . . . 904 | 551/946 (58%) | 0.0 |
| | SEQ ID NO 17247 - Drosophila | 10 . . . 949 | 699/946 (73%) | |
| | melanogaster, 975 aa. | | | |
| | [WO200171042-A2, 27 SEP. 2001] | | | |
| AAW72746 | Drosophila kinesin - Drosophila sp, | 7 . . . 904 | 550/946 (58%) | 0.0 |
| | 975 aa. [US5830659-A, | 10 . . . 949 | 698/946 (73%) | |
| | 3 NOV. 1998] | | | |
| AAW72745 | Drosophila kinesin N-terminal 411 | 7 . . . 386 | 273/383 (71%) | e−159 |
| | amino acid residues - Drosophila sp, | 10 . . . 392 | 322/383 (83%) | |
| | 411 aa. [US5830659-A, | | | |
| | 3 NOV. 1998] | | | |

[0384] In a BLAST search of public sequence databases, the NOV5a protein was found to have homology to the proteins shown in the BLASTP data in Table 5D.

TABLE 5D
Public BLASTP Results for NOV5a

| | | | Identities/ | |
|---|---|---|---|---|
| Protein | | | Similarities for | |
| Accession | | NOV5a Residues/ | the Matched | Expect |
| Number | Protein/Organism/Length | Match Residues | Portion | Value |
| Q12840 | Neuronal kinesin heavy chain | 1 . . . 1011 | 1010/1032 (97%) | 0.0 |
| | (NKHC) (Kinesin heavy chain | 1 . . . 1032 | 1010/1032 (97%) | |
| | isoform 5A) (Kinesin heavy chain | | | |
| | neuron-specific 1) - Homo sapiens | | | |
| | (Human), 1032 aa. | | | |
| P33175 | Neuronal kinesin heavy chain | 1 . . . 1011 | 983/1032 (95%) | 0.0 |
| | (NKHC) (Kinesin heavy chain | 1 . . . 1027 | 999/1032 (96%) | |
| | isoform 5A) (Kinesin heavy chain | | | |
| | neuron-specific 1) - Mus musculus | | | |
| | (Mouse), 1027 aa. | | | |
| S37711 | kinesin heavy chain - mouse, 1027 | 7 . . . 1011 | 956/1027 (93%) | 0.0 |
| | aa. | 6 . . . 1027 | 987/1027 (96%) | |
| O60282 | Kinesin heavy chain isoform 5C | 7 . . . 918 | 699/939 (74%) | 0.0 |
| | (Kinesin heavy chain neuron-specific | 6 . . . 943 | 806/939 (85%) | |
| | 2) - Homo sapiens (Human), 957 aa. | | | |
| BAC41428 | MKIAA0531 protein - Mus | 7 . . . 918 | 696/938 (74%) | 0.0 |
| | musculus (Mouse), 987 aa | 37 . . . 973 | 804/938 (85%) | |
| | (fragment). | | | |

[0385] PFam analysis predicts that the NOV5a protein contains the domains shown in the Table 5E.

TABLE 5E
Domain Analysis of NOV5a

| | | Identities/ | |
|---|---|---|---|
| | | Similarities for | |
| Pfam | NOV5a | the Matched | Expect |
| Domain | Match Region | Region | Value |
| kinesin | 15 . . . 357 | 178/417 (43%) | 8.4e−174 |
| | | 299/417 (72%) | |
| Phosphoprotein | 482 . . . 507 | 7/26 (27%) | 0.77 |
| | | 20/26 (77%) | |

### Example 6.

[0386] The NOV6 clone was analyzed, and the nucleotide and encoded polypeptide sequences are shown in Table 6A.

TABLE 6A
NOV6 Sequence Analysis

| | SEQ ID NO:25 | 3515 bp | |
|---|---|---|---|
| NOV6a, | AAAGGGGAGTCCGGTGAACGGGCAGAAGCACGGCCATGCCCAAGCCACCCCCAAGATCCCCCTGAA | | |
| CG125312-01 | | | |
| DNA Sequence | CCTGCACCTCCATCACGACCCATTCAGGAGCCTCCAGGAGCCCAGACACCAGCCCCCCACCATGGG | | |
| | CAGCAACGAGCGCTTCCACTGGCAGAGCCACAACGTGAAGCAGAGCGGCGTCGATGACATGGTGCT | | |
| | TCTTCCCCAGATCACCGAAGACGCCATTGCCGCCAACCTCCGGAACCGCTTCATGGACGACTACAT | | |
| | CTTCACCTACATCGGCTCTGTGCTCATCTCTGTAAACCCCTTCAAGCAGATGCCCTACTTCACCGA | | |
| | CCGTGAGATCCACCTCTATCAGGGCGCGGTGCAGTATGAGAATCCCCCGCACATCTACCCCCTCAC | | |
| | GGACAACATGTACCGGAACATGCTTATCGACTGTGAGAACCAGTGTGTCATCATTAGTGGAGAGAG | | |
| | TGGAGCTGGAGAGACAGTGGCACCCAAATATATCATGGGCTACATCTCCAACGTGTCTGGCAAAGG | | |
| | CGAGAAGGTCCAGCACGTCAAAGATATCATCCTGCAGTCCAACCCGCTGCTCGAGGCCTTCGCCAA | | |
| | CGCCAAGACTGTGCGCAACAACAATTCCAGCCGCTTTGGCAAGTACTTTGAGATCCAGTTCAGCCG | | |
| | AGGTGGGGAGCCAGATGGGGGCAAGATCTCCAACTTCTTGCTGGAGAAGTCCCGCGTGGTCATGAA | | |
| | AAATGAAAATGAGAGGAACTTCCACATCTACTACCAGCTGCTGGAAGGGGCCTCCCAGGAGCAAAG | | |
| | GCAGAACCTGGGCCTCATGACACCGGACTACTATTACTACCTCAACCAATCGGACACCTACCAAAT | | |
| | GGACGGCACGGACGACAGAAGCGACTTTGGTGAGACTCTGAGTGCTATGCAGGTTATTAAGATCCC | | |
| | GCCCAGCATCCAGCAGCTGGTCCTGCAGCTCGTGGCGGGGATCTTGCACCTGGGGAACATCAGTTT | | |
| | CTGTGAAGACGGGAATTACGCCCGAGTGGAGAGTGTGGACCTGGCCTTTCCCGCCTACCTGCTCAA | | |
| | CATTGACAGCGGGCGACTGCAGGAGAAGCTGACCAGCCGCAAGATGGACAGCCGCTAAAACAAGCC | | |
| | CAGCGAGTCCATCAATGTGACCCTCAACGTGGAGCAGGCAGCCTACACCCGTGATGCCCTAACCAA | | |
| | GGGGCTCTATGCCCGCCTCTTCGACTTCCTCGTGGAGGCGATCAACCGTGCTATGCAGAAACCCCA | | |
| | GGAAGAGTACAGCATCGGTGTGCTGGACATTTACCGCTTCGAGATCTTCCAGAAAAATAACTTCGA | | |
| | GCAGTTTTGCATCAACTTCGTCAATGAGAAGCTGCAGCAAATCTTTATCGAACTTACCCTGAAAAC | | |
| | CGAGCAGGAGGAGTATGTGCAGGAAGGCATCCGCTGGACTCCAATCCAGTACTTCAACAACAAAGT | | |
| | CGTCTGTGACCTCATCGAAAACAAGCTGAGCCCCCCAGGCATCATGAGCGTCTTAAACGACGTGTG | | |
| | CGCCACCATCCACGCCACGGGCGGGGGAGCAGACCAGACACTGCTGCAGAAGCTGCAGGCAACTGT | | |
| | GGGGACCCACGAGCATTTCAACACCTGGAGCGCCGGCTTCGTCATCCACCACTACGCTGGCAAAAT | | |
| | GTCCTACGACGTCAGCGGCTTCTGCGAGAGGATCCGAGACGTTCTCTTCTCCGACCTCATAGAGCT | | |
| | GATGCAGACCAGTGAGCAGTTCCTCCGGATGCTCTTCCCCGAGAAGCTGGATGGAGACAACAAGGG | | |
| | GCGCCCCAGCACCGCCGGCTCCAAGATCAAGAAACAACCCAACGACCTGGTGGCCACACTGATGAG | | |
| | GTGCACACCCCACTACATCCGCTGCATCAAACCCAACGAGACCAAGAAACCCCGAGACTGGGAGGA | | |
| | GAACAGGGTCAAGCACCAGGTGGAATACCTGGGCCTGAAGGAGAACATCAGGGTGCGCAGAGCCGG | | |
| | CTTCGCCTACCGCCGCCAGTTCGCCAAATTCCTGCAGAGGTATGCCATTCTGACCCCCGAGACGTG | | |
| | GCCGCGGTGGCGTGGGGACGAACGCCAGGGCGTCCAGCACCTGCTTCGAACGGTCAACATAAAGCC | | |
| | CGACCAGTACCAGATGGGGAGCACCAAGGTCTTTGTCAAGAACCCAGAGTCGCTTTTCCTCCTAAA | | |
| | GGAGGTGCGAGAGCGAAAGTTCGATGGCTTTGCCCGAACCATCCAGAAGGCCTGGCGGCGCCACGT | | |
| | GGCTGTCCGGAAGTACGAGGAGATGCGGGAGGAAGCTTCCAACATCCTGCTGAACAAGAAGGAGCG | | |
| | GAGGCGCAACAGCATCAATCGGAACTTCGTCGGGGACTACCTGGGGCTGGAGGAGCGGCCCGAGCT | | |
| | GCGTCAGTTCCTGGGCAAGACGGAGCGGGTGGACTTCGCCGATTCGGTCACCAAGTACGACCGCCG | | |
| | CTTCAAGCCCATCAAGCGGGACTTGATCCTGACGCCCAACTGTGTGTATGTGATTGGGCGAGAGAA | | |
| | AGTGAAGAAGGAGACCTGAGAGGGCCAGGTGTGTGAAGTCTTGAAGAAGAAAGTAAACATCCAGGC | | |
| | TCTGCGGGGAGTCTCCCTCAGCACGCGACACGACGACTTCTTCATCCTCCAAGAGGATGCCGCCGA | | |
| | CAGCTTCCTGGAGAGCGTCTTCAAGACCGAGTTTGTCAGCCTTCTGTGCAAGCGCTTCGAGGAAAC | | |
| | GACGCGGAGGCCCCTGCCCCTCACCTTCAGCGACAGACTACAGTTTCGGGTGAAGAAGGAGGGCTG | | |
| | CGGCGGTGGCGGCACCCGCAGCGTCACCTTCTCCCGCGGCTTCGGCGACTTGGCAGTGCTCAAAAT | | |
| | TGGCGGTCGGACCCTCACGGTCAGCGTCGGCGATGGGCTGCCCAAGAGCTCAGAGCCTACGCCGAA | | |
| | GGGAATGGCCAAGGGAAAACCTCGGAGGTCCTCCCAAGCCCCTACCCGGGCGGCCCCTGCGCCCCC | | |
| | CAGAGGTATCGATCGCAATGGGGTGCCCCCCTCTGCCAGAGGGGGCCCCCTGCCCCTGGAGATCAT | | |
| | GTCTGGAGGGGGCACCCACAGGCCTCCCCGGGGCCCTCCGTCCACATCCCTGGGAGCCAGCAGACG | | |
| | ACCCCGGGCACGTCCGCCCTCAGAGCACAACACAGAATTCCTCAACGTGCCTGACCAGGGCATAAC | | |
| | GGGAATGCAGACGAAGCGCAGCGTGGGGCAACGGCCAGTGCCTGGTGTCGGCCGACCCAAGCCCCA | | |
| | GCCTCGGACACATGGTCCCAGGTGCCGGGCCCTATACCAGTACGTAAGCCAAGATGTGGACGAGCT | | |
| | GAGCTTCAACGTGAACGAGGTCATTGAGATCCTCATGGAAGATCCCTCGGGCTGGTGGAAGGGCCG | | |
| | GCTTCACGGCCAGCAGGGCCTTTTCCCAGGAAACTACGTGGAGAAGATCTGAGCTGGGCCCTGGGA | | |
| | TACTGCCTTCTCTTTCGCCCGCCTATCTGCCTGCCGGCCTGGTGGGGAGCCAGGCCCTGCCAATGA | | |
| | GAGCCTCGTTTACCTGG | | |
| | ORF Start: ATG at 128 | | ORF Stop: TGA at 3416 |
| | SEQ ID NO:26 | 1096 aa | MW at 124743.0 kD |

| | |
|---|---|
| NOV6a, | MGSKERFHWQSHNVKQSGVDDMVLLPGITEDAIAANLRKRPMDDYIFTYIGSVLISLIPFKQMPYF |
| CG125312-01 | |
| Protein Sequence | TDREIDLYQGAVQYENPPHIYALTDNMYRNNLIDCENQCVIISGESGAGKTVAAKYIMGYISKVSG |
| | GGEKVQHVKDIILQSNPLLEAFGNAKTVANNNSSRFGKYFEIQFSRGGEPDGGKISNFLLEKSRVV |
| | MQMENERNFHIYYQLLEGASQEQRQNLGLMTPDYYYYLNQSDTYQVDGTDDRSDFGETLSAMQVIG |
| | IPPSIQQLVLQLVAGTLMLGNISFCEDGNYARVESVDLAFPAYLLGIDSGRLQEKLTSRKMDSRWG |
| | GRSESINVTLNVEQAAYTRDALAKGLYARLFDFLVEAIWRAMQKPQEEYSIGVLDIYGFEIFQKNG |
| | FEQFCINEVNEKLQQIFIELTLKAEQEEYVQEGIRWTPIQYFNNKVVCDLIENKLSPPGIMSVLDD |
| | VCATMMATGGGADQTLLQKLQAAVGTHEHFNSWSAGFVIHHYAGKVSYDVSGFCERNRDVLFSDLI |
| | ELMQTSEQFLRNLFPEKLDGDKKGRPSTAGSKIKKQANDLVATLMRCTPHYIRCIKPNETKRPRDW |
| | EENRVKHQVEYLGLKENIRVRRAGFAYRRQFAKFLQRYAILTPETWPRWRGDERQGVQHLLRAVNN |
| | EPDQYQMGSTKVFVKNPESLFLLEEVRERKFDGFARTIQKAWRRHVAVRKYEEMREEASNILLMKK |
| | ERRRNSINRNFVGDYLGLEERPELRQFLGKRERVDFADSVTKYDRRFKPIKRALILTPKCVYVIGR |
| | EKVKKGPEKGQVCEVLKKKVDIQALRGVSLSTRQDDFFILQEDAADSFLESVFKTEFVSLLCKRFE |
| | EATRRPLPLTFSDRLQFRVKKEGWGGGGTRSVTFSRGFGDLAVLKVGGRTLTVSVGDGLPKSSEPT |
| | RKGMAKGKPRRSSQAPTRAAPAPPRGMDRNGVPPSARGGPLPLEIMSGGGTHRPPRGPPSTSLGAS |
| | RRPRARPPSEHNTEFLNVPDQGMAGMQRKRSVGQRPVPGVGRPKPQPRTHGPRCRALYQYVGQDVD |
| | ELSFNVNEVIEILMEDPSGWWKGRLHGQEGLFPGNYVEKI |

[0387] Further analysis of the NOV6a protein yielded the following properties shown in Table 6B.

TABLE 6B
Protein Sequence Properties NOV6a

| SignalP analysis: | No Known Signal Sequence Predicted | | | |
|---|---|---|---|---|
| PSORT II analysis: | PSG: a new signal peptide prediction method | | | |
| | N-region: length 6; pos. chg 2; neg. chg 1 | | | |
| | H-region: length 8; peak value −3.21 | | | |
| | PSG score: −7.61 | | | |
| | GvH: von Heijne's method for signal seq. recognition | | | |
| | GvH score (threshold: −2.1): −6.60 | | | |
| | possible cleavage site: between 34 and 35 | | | |
| | >>> Seems to have no N-terminal signal peptide | | | |
| | ALOM: Klein et al's method for TM region allocation | | | |
| | Init position for calculation: 1 | | | |
| | Tentative number of TMS(s) for the threshold 0.5: 1 | | | |
| | Number of TMS(s) for threshold 0.5: 0 | | | |
| | PERIPHERAL Likelihood = 3.18 (at 41) | | | |
| | ALOM score: −1.22 (number of TMSs: 0) | | | |
| | MITDISC: discrimination of mitochondrial targeting seq | | | |
| | R content: | 1 | Hyd Moment(75): | 7.74 |
| | Hyd Moment(95): | 4.20 | G content: | 2 |
| | D/E content: | 2 | S/T content: | 3 |

Score: −6.18

Gavel: prediction of cleavage sites for mitochondrial preseq
R-2 motif at 16 ERF|HW
NUCDISC: discrimination of nuclear localization signals
pat4: KRPR (4) at 589
pat4: KPRR (4) at 932
pat4: RRPR (4) at 991
pat7: none
bipartite: KRERVDFADSVTKYDRR at 756
bipartite: KKGPEKGQVCEVLKKKV at 796
content of basic residues: 14.3%
NLS Score: 1.27
KDEL: ER retention motif in the C-terminus: none
ER Membrane Retention Signals:
KKXX-like motif in the C-terminus: YVEK
SKL: peroxisomal targeting signal in the C-terminus: none
PTS2: 2nd peroxisomal targeting signal: none
VAC: possible vacuolar targeting motif: none
RNA-binding motif: none
Actinin-type actin-binding motif:
type 1: none
type 2: none
NMYR: N-myristoylation pattern: none
Prenylation motif: none
memYQRL: transport motif from cell surface to Golgi: none
Tyrosines in the tail: none
Dileucine motif in the tail: none
checking 63 PROSITE DNA binding motifs: none
checking 71 PROSITE ribosomal protein motifs: none
checking 33 PROSITE prokaryotic DNA binding motifs: none
NNCN: Reinhardt's method for Cytoplasmic/Nuclear
discrimination
Prediction: cytoplasmic
Reliability: 76.7
COIL: Lupas's algorithm to detect coiled-coil regions
total: 0 residues
Final Results (k = 9/23):
60.9%: cytoplasmic
34.8%: nuclear
4.3%: peroxisomal
>> prediction for CG125312-01 is cyt (k = 23)

[0388] A search of the NOV6a protein against the Geneseq database, a proprietary database that contains sequences published in patents and patent publication, yielded several homologous proteins shown in Table 6C.

TABLE 6C
Geneseq Results for NOV6a

| | | | Identities/ | |
|---|---|---|---|---|
| | | | Similarities for | |
| Geneseq | Protein/Organism/Length | NOV6a Residues/ | the Matched | Expect |
| Identifier | [Patent #, Date] | Match Residues | Region | Value |
| AAU97544 | Human Myosin-1F protein | 1 . . . 1096 | 1089/1098 (99%) | 0.0 |
| | MYO1F - Homo sapiens, 1098 aa. | 1 . . . 1098 | 1092/1098 (99%) | |
| | [WO200218946-A2, 7 MAR. 2002] | | | |
| ABB97258 | Novel human protein SEQ ID NO: | 63 . . . 1096 | 994/1097 (90%) | 0.0 |
| | 526 - Homo sapiens, 1089 aa. | 1 . . . 1089 | 1006/1097 (91%) | |
| | [WO200222660-A2, 21 MAR. 2002] | | | |
| AAM39991 | Human polypeptide SEQ ID NO | 18 . . . 718 | 327/724 (45%) | e−173 |
| | 3136 - Homo sapiens, 1063 aa. | 47 . . . 761 | 453/724 (62%) | |
| | [WO200153312-A1, 26 JUL. 2001] | | | |
| ABG10171 | Novel human diagnostic protein | 18 . . . 718 | 327/724 (45%) | e−173 |
| | #10162 - Homo sapiens, 1050 aa. | 33 . . . 747 | 453/724 (62%) | |
| | [WO200175067-A2, 11 OCT. 2001] | | | |
| AAB64616 | Human secreted protein BLAST | 18 . . . 686 | 319/701 (45%) | e−169 |
| | search protein SEQ ID NO: 126 - | 16 . . . 697 | 438/701 (61%) | |
| | Homo sapiens, 697 aa. | | | |
| | [WO200077197-A1, 21 DEC. 2000] | | | |

[0389] In a BLAST search of public sequence databases, the NOV6a protein was found to have homology to the proteins shown in the BLASTP data in Table 6D.

TABLE 6D
Public BLASTP Results for NOV6a

| | | | Identities/ | |
|---|---|---|---|---|
| Protein | | | Similarities for | |
| Accession | | NOV6a Residues/ | the Matched | Expect |
| Number | Protein/Organism/Length | Match Residues | Portion | Value |
| O00160 | Myosin If (Myosin-IE) - Homo | 1 . . . 1096 | 1089/1098 (99%) | 0.0 |
| | sapiens (Human), 1098 aa. | 1 . . . 1098 | 1092/1098 (99%) | |
| P70248 | Myosin If - Mus musculus | 1 . . . 1096 | 993/1107 (89%) | 0.0 |
| | (Mouse), 1099 aa. | 1 . . . 1099 | 1042/1107 (93%) | |
| CAD34774 | Sequence 82 from Patent | 63 . . . 1096 | 994/1097 (90%) | 0.0 |
| | WO0222660 - Homo sapiens | 1 . . . 1089 | 1006/1097 (91%) | |
| | (Human), 1089 aa. | | | |
| Q90748 | Brush border myosin IB - Gallus | 1 . . . 1096 | 917/1102 (83%) | 0.0 |
| | gallus (Chicken), 1099 aa. | 1 . . . 1099 | 996/1102 (90%) | |
| Q63356 | Myosin Ie (Myosin heavy chain | 1 . . . 1096 | 793/1115 (71%) | 0.0 |
| | myr 3) - Rattus norvegicus (Rat), | 1 . . . 1107 | 929/1115 (83%) | |
| | 1107 aa. | | | |

[0390] PFam analysis predicts that the NOV6a protein contains the domains shown in the Table 6E.

TABLE 6E
Domain Analysis of NOV6a

| | | Identities/ | |
|---|---|---|---|
| | NOV6a | Similarities for | |
| Pfam | Match | the Matched | Expect |
| Domain | Region | Region | Value |
| myosin | 19 . . . 675 | 336/736 (46%) | 0 |
| _head | | 549/736 (75%) | |
| IQ | 692 . . . 712 | 8/21 (38%) | 0.96 |
| | | 16/21 (76%) | |
| SH3 | 1042 . . . 1096 | 28/58 (48%) | 2.2e−20 |
| | | 49/58 (84%) | |

### Example 7.

[0391] The NOV7 clone was analyzed, and the nucleotide and encoded polypeptide sequences are shown in Table 7A.

TABLE 7A
NOV7 Sequence Analysis

| | SEQ ID NO:27 | 1520 bp | |
|---|---|---|---|
| NOV7a, | TCACCGGCGCCGAGATGCGGTTCCGGCGCTTAGGGCGCCGCTAAACTCAGAGCCCGGGAGTCATGG | | |
| CG134632-01 | | | |
| DNA Sequence | CTGCGGGCGGTGCCGCCCCAGGTAAATCAGTCCAGGAGCAGGGCCCGGGCCTGGCGTACACTCTGC | | |
| | GAAAAATGGGGGCCAGAGCAAACAAGAAGAGCGAAAGCAAGAGGGCTAGGCAGCCAGAGGCGGCAG | | |
| | CAAGACTCAAGACGCCAACGGCGCCGTCTTCCTGGGGCCCCAGGGCCTGCGCCATCCCTGGGCTGC | | |
| | CGGGGCACCGCCTCTCCACGCCCCTCGTCCGGCGGCGGCTGCGACTGCTTCCGAGGTCATGTTCCC | | |
| | AGGACAGGGCGCGTCTTCAGGGTGGAAGCCTGGCGCACGTCCGAGGTGCCGAGGACCCAACCAGCC | | |
| | CAAACTCTGGGGGAAATGACTCCCCTCTGCCCTCGCCCCGCGCTCTGCTACCATTTCCTTACGTCT | | |
| | CTGCTTCGCTCAGCGATGCAAAACGCGCGAGGCGCACGGCAGAGGGCCAAAGCCGCGGTACTCTCC | | |
| | GGGCCAGGCCCGCCCCTCGGCCGCGCCGCGCAGCACGGGATTCCCCGGCCGCTGTCCAGCGCTGGC | | |
| | CGCCTGAGCCAAGGCTGCCGCGGAGCCAGTACAGTCGGGGCCGCTGGCTGGAAGAACGAGCTTCCT | | |
| | AAGGCGGGGGGGAGCCCGGCGCCGGGGCCGGAGACACCCGCCATTTCACCCAGTAAGCGAACCCGG | | |
| | CCTGCGGAGGTGGGCGGCATGCAGCTCCGCTTTGCCCGGCTCTCCGAGCACGCCACGGCCCCCACC | | |
| | CGGGGCTCCGCGCGCGCCGCGGGCTACGACCTGTACAGTGCCTATGATTACACAATACAACCTATG | | |
| | GAGAAACCTGTTGTGAAAACGGACATTCAGATAGCGCTCCCTTCTCAATGTTATGGAAGAGTAACT | | |
| | CCACCGTCAGGCTTGGCTGCAAAACACTTTATTGATGTAGCAGCTGGTGTCATAGATGAAGATTAT | | |
| | AGAGGAAATGTTGGTGTTGTACTGTTTAATTTTGGCAAAGAAAAGTTTGAAGTCAAAAAAGGTGAT | | |
| | CGAATTGCACAGCTCATTTGCGAACGGATTTTTTATCCAGAAATAGAAGAAGTTCAAGCCTTGGAT | | |
| | GACACCGAAAGGGGTTCAGGAGGTTTTGGTTCCACTGGAAAGAATAAAATTTTATGCCAAGAACAG | | |
| | AAAACAAGAAGTCATACCTTTTTCTTAAAAAAAAAAAAAAAGTTTTTGCTTCAAGTGTTTTGGTGT | | |
| | TTTGCACTTCTGTAAACTTACTAGCTTTACCTTCTAAAAGTACTGCATTTTTTACTTTTTTTTATG | | |
| | ATCAAGGAAAAGATCATTAAAAAAAAACACAAAGAAGTTTTTCTTTGTGTTTGGATCAAAAAGAAA | | |
| | CTTTGTTTTTCCGCAATTGAAGGTTGTATGTAAATCTGCTTTGTGGTGACCTCATGTAAACAGTGT | | |
| | TTCTTAAAATCAAATGTAAATCAATTCCCGATTAAAAAAAAAAGCCTGTATTTAACTCAAAAAAAA | | |
| | ORF Start: ATG at 412 | | ORF Stop: TAA at 1168 |
| | SEQ ID NO:28 | 252 aa | MW at 26562.9 kD |
| NOV7a, | MTPLCPRPALCYHFLTSLLRSANQNARGARQRAEAAVLSGPGPPLGRAAQHGIPRPLSSAGRLSQG | | |
| CG134632-01 | | | |
| Protein Sequence | CRGASTVGAAGWKGELPKAGGSPAPGPETPAISPSKRARPAEVGGMQLRFARLSEHATAPTRGSAP | | |
| | AAGYDLYSAYDYTIPPMEKAVVKTDIQIALPSGCYGRVAPRSGLAAKHFIDVGAGVIDEDYRGNVG | | |
| | AAVLFNFGKEKFEVKKGDRIAQLICERIFYPEIEEVQALDDTERGSGGFGSTGKN | | |
| | SEQ ID NO:29 | 916 bp | |
| NOV7b, | GTTCCCAGGACGGGCGCGTCTTCAGGGTGGAACCTGGCGCACGTCCGGAGGTGCCGAAAACCCAA | | |
| CG134632-02 | | | |
| DNA Sequence | CAGCCCAAACTCTGGGAGAAATGACTCCCCTCTGCCCTCGCCCCGCCCTCTGCTACCATTTCCTT | | |
| | ACGTCTCTGCTTCGCTCAGCGATGCAAAACGCGCCAGGCGCACGGCAGAAAGCCGAAAGCCGCGGTA | | |
| | CTCTCCGGGCCAGGCCCGCCCCTCGGCCGCGCCGCGCAGCACGGGATTCCCCGGCCGCTGTCCAGC | | |
| | GCTGGCCGCCTGAGCCAAGGCTGCCGCGGAGCCPAGACACCCGCCATTTCACCCAGTAAGCCAACC | | |
| | CGGCCTGCGGAGGTGGGCGGCATGCAGCTCCGCTTTGCCCGGCTCTCCGAGCACGCCACAACCCCC | | |
| | ACCCGGGGCTCCGCCCGCGCCGCGGGCTACGACCTGTACAGTGCCTATGATTACACAATACCACCT | | |
| | ATGGAGAAAGCTGTTGTCAAAACGGACATTCAGATAGCGCTCCCTTCTGCGTGTTATGGAAGAGTG | | |
| | GCTCCACGGTCAGGCTTGGCTGCAAAACACTTTATTGATGTAGGAGCTGGTGTCATAGATGAAGAT | | |
| | TATAGAGGAAATGTTGGTGTTGTACTGTTTAATTTTGGCAAAGAAAAGTTTGAAGTCAAAAAAGGT | | |
| | GATCCAATTGCACAGCTCATTTGCGAACGGATTTTTTATCCAGAAATAGAAGAAGTTCAAGCCTTG | | |
| | GATGACACCGAAAGGGGTTCAGGAGGTTTTGGTTCCACTGGAAAGAATTAAAATTTATGCCAAGAA | | |
| | CAGAAAACAAGAAGTCATACCTTTTTCTTAAAAAAAAAAAAAGTTTTTGCTTCPAGTGTTTTGGTG | | |
| | TTTTGCACTTCTGTAAACTTACTAGCTTTACCTTCTAAAAGTACTGCATTTTTTACTT | | |
| | ORF Start: ATG at 88 | | ORF Stop: TAA at 775 |
| | SEQ ID NO:30 | 229 aa | MW at 24487.7 kD |
| NOV7b, | MTPLCPRPALCYHFLTSLLRSAMQNARGARQRAEAAVLSGPGPPLGAAQHGIPRPLSSAGRLSQG | | |
| CG134632-02 | | | |
| Protein Sequence | CRGAKTPAISPSKRARPAEVGGMGLFARLSEHATAPTRGSARAAGYDLYSAYDYTIPPMEKAVVK | | |
| | TDIQIALPSGCYGRVAPRSGLAAKHFIDVGAGVIDEDYRGNGVTLFNFGAAKFEVKKGDRIAQLI | | |
| | ERIFYPEIEEVQALDDTERGSGCFGSTGKN | | |
| | SEQ ID NO:31 | 1816 bp | |
| NOV7c, | CTCGCCTTCTGGCTCTGCCATGCCCTGCTCTGAAGAGACACCCGCCATTTCACCCAGTAAGCGGGC | | |
| CG134632-03 | | | |
| DNA Sequence | CCGGCCTGCGGAGGTGCGCGCCATGCAGCTCCGCTTTGCCCGGCTCTCCGAGCACGCCACGGCCCC | | |
| | CACCCGGCGCTCCGCGCGCGCCGCGGGCTACGACCTGTACAGTGCCTATGATTACACAATACCACC | | |
| | TATGGAGAAAGCTGTTGTGAAAACGGACATTCAGATAGCGCTCCCTTCTGGGTGTTATGGAAGAGT | | |
| | GGCTCCACGGTCAGGCTTGGCTGCAAAACACTTTATTGATGTAGGAGCTGGTGTCATAGATGAAGA | | |
| | TTATAGAGGAAATGTTGGTGTTGTACTGTTTAATTTTGGCAAAGAAAAGTTTGAAGTCAAAAAAGG | | |
| | TGATCGAATTGCACAGCTCATTTGCGAACGGATTTTTTATCCAGAAATAGAAGAAGTTCAAGCCTT | | |
| | GGATGACACCGAAAGGGGTTCAGGAGGTTTTGGTTCCACTGGAAAGAATTAAAATTTATGCCAAGA | | |
| | ACAGAAAACAAGAAGTCATACCTTTTTCTTAAAAAAAAAAAAAAAGTTTTTGCTTCAAGTGTTTTG | | |
| | GTGTTTTGCACTTCTGTAAACTTACTAGCTTTACCTTCTAAAAGTACTGCATTTTTTACTTTTTTT | | |
| | TATGATCAAGGAAAAGATCGTTAAAAAAAAACACAAAGAAGTTTTTCTTTGTGTTTGGATCAAAAA | | |
| | GAAACTTTGTTTTTCCGCAATTGAAGGTTGTATGTAAATCTGCTTTGTGGTGACCTGATGTAAACA | | |
| | GTGTCTTCTTAAAATCAAATGTAAATCAATTACAGATTAAAAAAAAAAGCCTGTATTTAACTCATA | | |
| | TGATCTCCCTTCAGCAACTTATTTTGCTTTAATTGCTTTAAATCTTAAGCAATATTTTTTATTCAG | | |
| | TAAACAAATTCTTTCACAAGGTACAAAATCTTGCATAAGCTGAACTAAAATAAAAATGAAAAGGAG | | |
| | AGATTAAAGGTATTCCTTGTTCTTCCCTTCTCTTCACTAGTCTAAAAACTTCTTTTTAATCTTAAG | | |
| | ATTCTTTGTGATGAGGGTGAGAAAAAGAATCCTCAGTTTATTTTTCCACTATTAATCTTTCTTTTG | | |
| | ATAAATCCTCTATTGACTGGGTAGAGGTATGTTTGTGAAAGACATGTAACTTGGGGATTTGTTACT | | |
| | TTAGGTTTGTTCCCTTGAATTTCATCTCATCAGGCAAATTGTACTAGTTGTAGTTACGAGTTTTCC | | |
| | CTCAGTGAAGTAGCAATAGGCTGTAATCAAGAAAATATCCCATTTATAGAGATAAGATAAATGAAA | | |
| | TAATACTTCAGCCACCAGGTTTTTCTGTCTCACATACATAAGCAGCATTTCATTGCAGATATAAGA | | |
| | CTGATTCTGTGGCTTACCTTGATTAACATCTTTTGGAAGTTTTGCTAGTGTGCTTTCCTTTCTTTA | | |
| | CTATGTTTCTCAGATTCCTTTGTATCAGGGTTTTGGGTGTCACTTAGGTTTTGTCCATCAGATTCT | | |
| | GTGAGACACCAGGCATCGTTTTGAGGATGTGCGTTATACACATGGAGTGCTTCTGGAACTATCAGC | | |
| | CCACTTGACCACCCAGTTTGTGGAAGCACAGGCAAGAGTGTTCTTTTCTGGTCATTCTCCAGGCCA | | |
| | TTTAATACCCTGCAATGTAATTGTCCCTCTGTGGCTCACATTTCATTAGTGAGCCATGAAATCAAC | | |
| | TCAGTGGGACATAGCCAGCATTTTTGCATACCAGGTTGCGCTATAAAATATTTCTGTTGTCAATAA | | |
| | ATTTTAATGTTTTCCTGCTAAAAAAAAAAAAAAA | | |
| | ORF Start: ATG at 20 | | ORF Stop: TAA at 512 |
| | SEQ ID NO:32 | 164 aa | MW at 17747.9 kD |

| | |
|---|---|
| NOV7c, | MPCSEETPAISPSKRARPAEVGGMQLRFARLSEHATAPTRGSARAAGYDLYSAYDYTIPPMEKAVV |
| CG134632-03 | |
| Protein Sequence | KTDIQIALPSGCYGRVAPRSGLAAKHFIDVGAGVIDEDYRGNVGVVLFNFGKEKFEVKKGDRIAQL |
| | ICERIFYPEIEEVQALDDTERGSGGFGSTGKN |

[0392] Sequence comparison of the above protein sequences yields the following sequence relationships shown in Table 7B.

TABLE 7B
Comparison of NOV7a against NOV7b and NOV7c.

| | | Identities/ |
|---|---|---|
| | | Similarities for |
| Protein | NOV7a Residues/ | the Matched |
| Sequence | Match Residues | Region |
| NOV7b | 1 . . . 252 | 228/252 (90%) |
| | 1 . . . 229 | 229/252 (90%) |
| NOV7c | 94 . . . 252 | 159/159 (100%) |
| | 6 . . . 164 | 159/159 (100%) |

[0393] Further analysis of the NOV7a protein yielded the following properties shown in Table 7C.

TABLE 7C
Protein Sequence Properties NOV7a

| SignalP analysis: | Cleavage site between residues 29 and 30 | | | |
|---|---|---|---|---|
| PSORT II analysis: | PSG: a new signal peptide prediction method | | | |
| | N-region: length 7; pos. chg 1; neg. chg 0 | | | |
| | H-region: length 12; peak value 5.44 | | | |
| | PSG score: 1.04 | | | |
| | GvH: von Heijne's method for signal seq. recognition | | | |
| | GvH score (threshold: −2.1): −4.15 | | | |
| | possible cleavage site: between 21 and 22 | | | |
| | >>> Seems to have no N-terminal signal peptide | | | |
| | ALOM: Klein et al's method for TM region allocation | | | |
| | Init position for calculation: 1 | | | |
| | Tentative number of TMS(s) for the threshold 0.5: 0 | | | |
| | number of TMS(s) . . . fixed | | | |
| | PERIPHERAL Likelihood = 7.21 (at 174) | | | |
| | ALOM score: 7.21 (number of TMSs: 0) | | | |
| | MTOP: Prediction of membrane topology (Hartmann et al.) | | | |
| | Center position for calculation: 6 | | | |
| | Charge difference: 0.5 C(2.5)-N(2.0) | | | |
| | C > N: C-terminal side will be inside | | | |
| | >>>Caution: Inconsistent mtop result with signal peptide | | | |
| | MITDISC: discrimination of mitochondrial targeting seq | | | |
| | R content: | 5 | Hyd Moment (75): | 8.02 |
| | Hyd Moment (95): | 9.18 | G content: | 1 |
| | D/E content: | 1 | S/T content: | 4 |

```
Score: 0.92
Gavel: prediction of cleavage sites for mitochondrial preseq
R-2 motif at 142 ARA|AG
NUCDISC: discrimination of nuclear localization signals
pat4: none
pat7: PSKRARP (4) at 100
bipartite: none
content of basic residues: 12.7%
NLS Score: −0.13
KDEL: ER retention motif in the C-terminus: none
ER Membrane Retention Signals:
KKXX-like motif in the C-terminus: STGK
SKL: peroxisomal targeting signal in the C-terminus: none
PTS2: 2nd peroxisomal targeting signal: none
VAC: possible vacuolar targeting motif: none
RNA-binding motif: none
Actinin-type actin-binding motif:
type 1: none
type 2: none
NMYR: N-myristoylation pattern: none
Prenylation motif: none
memYQRL: transport motif from cell surface to Golgi: none
Tyrosines in the tail: none
Dileucine motif in the tail: none
checking 63 PROSITE DNA binding motifs: none
checking 71 PROSITE ribosomal protein motifs: none
checking 33 PROSITE prokaryotic DNA binding motifs: none
NNCN: Reinhardt's method for Cytoplasmic/Nuclear
discrimination
Prediction: cytoplasmic
Reliability: 55.5
COIL: Lupas's algorithm to detect coiled-coil regions
total: 0 residues
Final Results (k = 9/23):
78.3%: mitochondrial
  4.3%: Golgi
  4.3%: cytoplasmic
  4.3%: nuclear
  4.3%: peroxisomal
  4.3%: endoplasmic reticulum
>> prediction for CG134632-01 is mit (k = 23)
```

[0394] A search of the NOV7a protein against the Geneseq database, a proprietary database that contains sequences published in patents and patent publication, yielded several homologous proteins shown in Table 7D.

TABLE 7D
Geneseq Results for NOV7a

| | | | Identities/ | |
|---|---|---|---|---|
| | | | Similarities for | |
| Geneseq | Protein/Organism/Length | NOV7a Residues/ | the Matched | Expect |
| Identifier | [Patent #, Date] | Match Residues | Region | Value |
| AAW30281 | Human dUTPase (mitochondrial | 1 . . . 252 | 235/252 (93%) | e−134 |
| | form) - Homo sapiens, 252 aa. | 1 . . . 252 | 236/252 (93%) | |
| | [WO9736916-A1, 09 OCT. 1997] | | | |
| AAW30280 | Human dUTPase (nuclear form) - | 94 . . . 252 | 159/159 (100%) | 3e−88 |
| | Homo sapiens, 164 aa. | 6 . . . 164 | 159/159 (100%) | |
| | [WO9736916-A1, 09 OCT. 1997] | | | |
| AAR70144 | Human dUTPase protomer - Homo | 112 . . . 252 | 141/141 (100%) | 2e−77 |
| | sapiens, 141 aa. [CA2126001-A, | 1 . . . 141 | 141/141 (100%) | |
| | 28 JAN. 1995] | | | |
| ABB60791 | Drosophila melanogaster polypeptide | 104 . . . 250 | 96/147 (65%) | 1e−50 |
| | SEQ ID NO 9165 - Drosophila | 12 . . . 158 | 114/147 (77%) | |
| | melanogaster, 188 aa. | | | |
| | [WO200171042-A2, 27 SEP. 2001] | | | |
| AAB44003 | Human cancer associated protein | 94 . . . 185 | 91/92 (98%) | 2e−46 |
| | sequence SEQ ID NO: 1448 - Homo | 12 . . . 103 | 91/92 (98%) | |
| | sapiens, 106 aa. [WO200055350-A1, | | | |
| | 21 SEP. 2000] | | | |

[0395] In a BLAST search of public sequence databases, the NOV7a protein was found to have homology to the proteins shown in the BLASTP data in Table 7E.

TABLE 7E
Public BLASTP Results for NOV7a

| | | | Identities/ | |
|---|---|---|---|---|
| Protein | | | Similarities for | |
| Accession | | NOV7a Residues/ | the Matched | Expect |
| Number | Protein/Organism/Length | Match Residues | Portion | Value |
| P33316 | Deoxyuridine 5′-triphosphate | 1 . . . 252 | 235/252 (93%) | e−134 |
| | nucleotidohydrolase, mitochondrial | 1 . . . 252 | 236/252 (93%) | |
| | precursor (EC 3.6.1.23) (dUTPase) | | | |
| | (dUTP pyrophosphatase) - Homo | | | |
| | sapiens (Human), 252 aa. | | | |
| Q96Q81 | dUTP pyrophosphatase - Homo | 94 . . . 252 | 159/159 (100%) | 1e−87 |
| | sapiens (Human), 164 aa. | 6 . . . 164 | 159/159 (100%) | |
| A46256 | dUTP pyrophosphatase (EC 3.6.1.23) - | 112 . . . 252 | 141/141 (100%) | 5e−77 |
| | human, 141 aa. | 1 . . . 141 | 141/141 (100%) | |
| Q9CU90 | 5133400F09Rik protein - Mus | 31 . . . 252 | 154/222 (69%) | 4e−76 |
| | musculus (Mouse), 204 aa (fragment). | 3 . . . 204 | 167/222 (74%) | |
| Q8VCG1 | Similar to dUTPase - Mus musculus | 30 . . . 252 | 154/225 (68%) | 1e−74 |
| | (Mouse), 200 aa. | 9 . . . 200 | 167/225 (73%) | |

[0396] PFam analysis predicts that the NOV7a protein contains the domains shown in the Table 7F.

TABLE 7F
Domain Analysis of NOV7a

| | | Identities/ | |
|---|---|---|---|
| | NOV7a | Similarities for | |
| Pfam | Match | the Matched | Expect |
| Domain | Region | Region | Value |
| dUTPase | 121 . . . 250 | 71/138 (51%) | 1.1e−64 |
| | | 123/138 (89%) | |

### Example 8.

[0397] The NOV8 clone was analyzed, and the nucleotide and encoded polypeptide sequences are shown in Table 8A.

TABLE 8A
NOV8 Sequence Analysis

| | SEQ ID NO:33 | 960 bp | |
|---|---|---|---|
| NOV8a, | GTGAGTTGGCTGCCGGTGAGTTGGGTGCCGGTGGAGTCGTGTTGGTCCTCAGAATCCCCGCGTAGCee | | |
| CG148411-01 | | | |
| DNA Sequence | CGCTGCCTCCTCCTACCCTCGCCATGTTTCTTACCCGGTCTGAGTACGACAGCTTAATTCTACAGC | | |
| | CATTGGGATCCAGACATCAGAGGGTGTGTGCCTAGCTGTGGAGAAGAGAATTACTTCCCCACTGAT | | |
| | GGAGCCCAGCAGCATTGAGAAAATTGTAGAGATTGATGCTCACATAGGTTGTCCAATGAGTGAACT | | |
| | AATTGCTGATGCTAAGACTTTAATTGATAAAGCCAGAGTGGAGACACAGAACCACTGGTTCACCTA | | |
| | CAATGAGACAATGACAGTGGAGAGTGTGACCCAAGCTGTGTCCAATCTGGCTTTGCAGTTTGGAGA | | |
| | AGAAGATGCAGATCCAGGTGCCATGTCTCGTCCCTTTGGAGTAGCATTATTATTTGGAGGAGTTGA | | |
| | TGAGAAAGGACCCCAGCTGTTTCATATGGACCCATCTGGGACCTTTGTACAGTGTGATGCTCGAGC | | |
| | AATTGGCTCTGCTTCAGAGGGTGCCCAGAGCTCCTTGCAAGAACTTTACCACAAGTCTATGACTTT | | |
| | GAAAGAAGCCATCAAGTCTTCACTCATCATCCTCAAACAAGTAATGGAGGAGAAGCTGAATGCAAC | | |
| | AAACATTGAGCTAGCCACAGTGCAGCCTGGCCAGAATTTCCACATGTTCACAAAGGAAGAACTTGA | | |
| | AGAGGTTATCAAGGACATTTAACGAATCCTGATCCTCAGAACTTCTCTGGGACAATTTCAGTTCTA | | |
| | ATAATGTCCTTAAATTTTATTTCCAGCTCCTGTTCCTTGGAAAATCTCCATTGTATGTGCATTTTT | | |
| | TAAATGATGTCTGTACATAAGGCAGTTCTGAAATAAAGAAATTTTAAAATAAAAAAAAAAAAAAAA | | |
| | AAAAAAAAAAAAAAAAAAAAAAA | | |
| | ORF Start: ATG at 197 | | ORF Stop: TAA at 746 |
| | SEQ ID NO:34 | 183 aa | MW at 20048.5 kD |
| NOV8a, | MFPSSIEKIVEIDAHIGCAMSGLIADAKTLIDKARVETQNHWFTYNETMTVESVTQAVSNLALQFG | | |
| CG148411-01 | | | |
| Protein Sequence | EEDADPGAMSRPFGVALLFGGVDEKGPQLFHMDPSGTFVQCDARAIGSASEGAQSSLQELYHKSMT | | |
| | ILKEAIESSLIILKQVMEEKLNATNIELATVQPCQNFHMFTKEELEEVIKDI | | |
| | SEQ ID NO:35 | 959 bp | |
| NOV8b, | CTGCCTCCTCCTACCCTCGCCATGTTTCTTACCCGGTCTQAGTACGACAGGGGCGTGAATACTTTT | | |
| CG148411-02 | | | |
| DNA Sequence | TCTCCCGAAGGAAGATTATTTCAAGTGGAATATGACATTGAGGCTATCAAGCTTGGTTCTACAGCC | | |
| | ATTGGGATCCAGACATCAGAGGGTGTGTCCCTAGCTGTGGAGAAGAGAATTACTTCCCCACTGATG | | |
| | GAGCCCAGCAGCATTGAGAAAATTGTAGAGATTGATGCTCACATAGGTTGTGCCATGAGTGGGCTA | | |
| | ATTGCTGATGCTAAGACTTTAATTGATAAAGCCAGAGTGGAGACACAGAACCACTGGTTCACCTAC | | |
| | AATGAGACAATGACAGTGGAGAGTGTGACCCAAGCTGTGTCCAATCTGGCTTTGCAGTTTGGAGAA | | |
| | GAAGATGCAGATCCAGGTGCCATGTCTCGTCCCTTTGGAGTAGCATTATTATTTGGAGGAGTTGAT | | |
| | GAGAAACGACCCCAGCTGTTTCATATGGACCCATCTGGGACCTTTGTACAGTGTCATGCTCGAGCA | | |
| | ATTGGCTCTGCTTCAGAGGGTGCCCAGAGCTCCTTGCAAGAACTTTACCACAAGTCTATGACTTTG | | |
| | AAAGAAGCCATCAAGTCTTCACTCATCATCCTCAAACAAGTAATCGAGGAGAAGCTGAATGCAACA | | |
| | AACATTGAGCTAGCCACAGTGCAGCCTGGCCACAATTTCCACATGTTCACAAAGGAAGAACTTGAA | | |
| | GAGGTTATCAAGGACATTTAAGGAATCCTGATCCTCAGAACTTCTCTGGGACAATTTCAGTTCTAA | | |
| | TAATGTCCTTAAATTTTATTTCCAGCTCCTGTTCCTTGGAAAATCTCCATTCTATCTGCATTTTTT | | |
| | AAATGATGTCTGTACATAAACGCAGTTCTGAAATAAAGAAAATTTTAAAATAAAAAAAAAAAAAAA | | |
| | AAAAAAAAAAAAAAAAAAAAAAAAAAAAAAAAAAA | | |
| | ORF Start: ATG at 22 | | ORF Stop: TAA at 745 |
| | SEQ ID NO:36 | 241 aa | MW at 26468.8 kD |

| | |
|---|---|
| NOV8b, | MFLTRSEYDRGVNTFSPEGRLFQVEYDIEAIKLGSTAIGIQTSEGVCLAVEKRITSPLMEPSSIEK |
| CG148411-02 | |
| Protein Sequence | IVEIDAHIGCANSGLTADAKTLIDKARVETQNNWFTYNETMTVESVTQAVSNLALQFGEEDADPGA |
| | MSRPFGVALLFGGVDEKGPQLFHMDPSGTFVQCDARAIGSASEGAQSSLQELYHKSMTLKEAIKSS |
| | LIILKQVMEEKLNATNIELATVQPGQNFHMFTKEELEEVIKDI |

[0398] Sequence comparison of the above protein sequences yields the following sequence relationships shown in Table 8B.

TABLE 8B
Comparison of NOV8a against NOV8b.

| | | Identities/ |
|---|---|---|
| | | Similarities for |
| Protein | NOV8a Residues/ | the Matched |
| Sequence | Match Residues | Region |
| NOV8b | 1 . . . 183 | 183/183 (100%) |
| | 59 . . . 241 | 183/183 (100%) |

[0399] Further analysis of the NOV8a protein yielded the following properties shown in Table 8C.

TABLE 8C
Protein Sequence Properties NOV8a

| SignalP analysis: | No Known Signal Sequence Predicted | | | |
|---|---|---|---|---|
| PSORT II analysis: | PSG: a new signal peptide prediction method | | | |
| | N-region: length 11; pos. chg 1; neg. chg 3 | | | |
| | H-region: length 1; peak value 0.00 | | | |
| | PSG score: −4.40 | | | |
| | GvH: von Heijne's method for signal seq. recognition | | | |
| | GvH score (threshold: −2.1): −8.07 | | | |
| | possible cleavage site: between 29 and 30 | | | |
| | >>> Seems to have no N-terminal signal peptide | | | |
| | ALOM: Klein et al's method for TM region allocation | | | |
| | Init position for calculation: 1 | | | |
| | Tentative number of TMS(s) for the threshold 0.5: 0 | | | |
| | number of TMS(s) . . . fixed | | | |
| | PERIPHERAL Likelihood = 1.54 (at 9) | | | |
| | ALOM score: 1.54 (number of TMSs: 0) | | | |
| | MITDISC: discrimination of mitochondrial targeting seq | | | |
| | R content: | 0 | Hyd Moment (75): | 8.84 |
| | Hyd Moment (95): | 5.71 | G content: | 0 |
| | D/E content: | 2 | S/T content: | 2 |

```
Score: −6.11
Gavel: prediction of cleavage sites for mitochondrial preseq
cleavage site motif not found
NUCDISC: discrimination of nuclear localization signals
pat4: none
pat7: none
bipartite: none
content of basic residues: 7.7%
NLS Score: −0.47
KDEL: ER retention motif in the C-terminus: none
ER Membrane Retention Signals:
KKXX-like motif in the C-terminus: VIKD
SKL: peroxisomal targeting signal in the C-terminus: none
PTS2: 2nd peroxisomal targeting signal: none
VAC: possible vacuolar targeting motif: none
RNA-binding motif: none
Actinin-type actin-binding motif:
type 1: none
type 2: none
NMYR: N-myristoylation pattern: none
Prenylation motif: none
memYQRL: transport motif from cell surface to Golgi: none
Tyrosines in the tail: none
Dileucine motif in the tail: none
checking 63 PROSITE DNA binding motifs: none
checking 71 PROSITE ribosomal protein motifs: none
checking 33 PROSITE prokaryotic DNA binding motifs: none
NNCN: Reinhardt's method for Cytoplasmic/Nuclear
discrimination
Prediction: cytoplasmic
Reliability: 89
COIL: Lupas's algorithm to detect coiled-coil regions
total: 0 residues
Final Results (k = 9/23):
60.9%: cytoplasmic
13.0%: mitochondrial
13.0%: nuclear
  8.7%: peroxisomal
  4.3%: plasma membrane
>> prediction for CG148411-01 is cyt (k = 23)
```

[0400] A search of the NOV8a protein against the Geneseq database, a proprietary database that contains sequences published in patents and patent publication, yielded several homologous proteins shown in Table 8D.

TABLE 8D
Geneseq Results for NOV8a

| | | | Identities/ | |
|---|---|---|---|---|
| | | | Similarities for | |
| Geneseq | Protein/Organism/Length | NOV8a Residues/ | the Matched | Expect |
| Identifier | [Patent #, Date] | Match Residues | Region | Value |
| AAB35091 | Proteasome subunit Zeta protein | 1 . . . 183 | 183/183 (100%) | e−100 |
| | sequence - Unidentified, 241 aa. | 59 . . . 241 | 183/183 (100%) | |
| | [WO200072008-A2, 30 NOV. 2000] | | | |
| AAY58476 | Proteasomal zeta subunit - | 1 . . . 183 | 183/183 (100%) | e−100 |
| | Unidentified, 241 aa. | 59 . . . 241 | 183/183 (100%) | |
| | [WO9966065-A2, 23 DEC. 1999] | | | |
| AAM40689 | Human polypeptide SEQ ID NO | 1 . . . 183 | 182/183 (99%) | e−100 |
| | 5620 - Homo sapiens, 249 aa. | 67 . . . 249 | 183/183 (99%) | |
| | [WO200153312-A1, 26 JUL. 2001] | | | |
| AAM38903 | Human polypeptide SEQ ID NO | 1 . . . 183 | 182/183 (99%) | e−100 |
| | 2048 - Homo sapiens, 241 aa. | 59 . . . 241 | 183/183 (99%) | |
| | [WO200153312-A1, 26 JUL. 2001] | | | |
| AAM79994 | Human protein SEQ ID NO 3640 - | 1 . . . 183 | 182/183 (99%) | e−100 |
| | Homo sapiens, 249 aa. | 67 . . . 249 | 183/183 (99%) | |
| | [WO200157190-A2, 09 AUG. 2001] | | | |

[0401] In a BLAST search of public sequence databases, the NOV8a protein was found to have homology to the proteins shown in the BLASTP data in Table 8E.

TABLE 8E
Public BLASTP Results for NOV8a

| | | | Identities/ | |
|---|---|---|---|---|
| Protein | | | Similarities for | |
| Accession | | NOV8a Residues/ | the Matched | Expect |
| Number | Protein/Organism/Length | Match Residues | Portion | Value |
| S17521 | multicatalytic endopeptidase complex | 1 . . . 183 | 183/183 (100%) | e−100 |
| | (EC 3.4.99.46) zeta chain - human, 241 | 59 . . . 241 | 183/183 (100%) | |
| | aa. | | | |
| P28066 | Proteasome subunit alpha type 5 (EC | 1 . . . 183 | 183/183 (100%) | e−100 |
| | 3.4.25.1) (Proteasome zeta chain) (EC | 59 . . . 241 | 183/183 (100%) | |
| | 3.4.25.1) (Macropain zeta chain) | | | |
| | (Multicatalytic endopeptidase complex | | | |
| | zeta chain) - Homo sapiens (Human), | | | |
| | 241 aa. | | | |
| Q9Z2U1 | Proteasome subunit alpha type 5 (EC | 1 . . . 183 | 182/183 (99%) | 1e−99 |
| | 3.4.25.1) (Proteasome zeta chain) (EC | 59 . . . 241 | 183/183 (99%) | |
| | 3.4.25.1) (Macropain zeta chain) | | | |
| | (Multicatalytic endopeptidase complex | | | |
| | zeta chain) - Mus musculus (Mouse), | | | |
| | 241 aa. | | | |
| P34064 | Proteasome subunit alpha type 5 (EC | 1 . . . 183 | 181/183 (98%) | 6e−99 |
| | 3.4.25.1) (Proteasome zeta chain) (EC | 59 . . . 241 | 182/183 (98%) | |
| | 3.4.25.1) (Macropain zeta chain) | | | |
| | (Multicatalytic endopeptidase complex | | | |
| | zeta chain) - Rattus norvegicus (Rat), | | | |
| | 241 aa. | | | |
| Q95083 | Proteasome subunit alpha type 5 (EC | 1 . . . 183 | 117/185 (63%) | 2e−61 |
| | 3.4.25.1) - Drosophila melanogaster | 59 . . . 243 | 147/185 (79%) | |
| | (Fruit fly), 244 aa. | | | |

[0402] PFam analysis predicts that the NOV8a protein contains the domains shown in the Table 8F.

TABLE 8F
Domain Analysis of NOV8a

| | | Identities/ | |
|---|---|---|---|
| | | Similarities for | |
| Pfam | NOV8a | the Matched | Expect |
| Domain | Match Region | Region | Value |
| proteasome | 1 . . . 128 | 56/135 (41%) | 5.3e−49 |
| | | 120/135 (89%) | |

### Example 9

[0403] The NOV9 clone was analyzed, and the nucleotide and encoded polypeptide sequences are shown in Table 9A.

TABLE 9A
NOV9 Sequence Analysis

| | SEQ ID NO:37 | 4650 bp | |
|---|---|---|---|
| NOV9a, | ATGAGCCTTTCATTTTGTGGTAACAACATTTCTTCATATAATATCAACGATGGTGTACTACAAAAT | | |
| CG54077-01 | | | |
| DNA Sequence | TCCTGCTTTGTGGATGCCCTCAACCTGGTCCCTCATGTCTTTCTGTTGTTTATCACTTTTCCAATA | | |
| | TTGTTTATTGGGTGGGGGAGCCAAAGCTCAAAAGTACAAATTCACAACAACACATGGCTTCATTTT | | |
| | CCGGGACATAACCTGAGATGGATTCTTACATTCGCTCTCCTGTTTGTGCATGTCTGTGAAATAGAA | | |
| | GAAGGCATTGTTTCAGACTCGCGGCGAAAATCAAGGCACCTCAACCTCTTTATGCCAGCCGTGATG | | |
| | GGATTCGTTGCCACTACAACATCGATAGTGTATTATCATAATATCGACATCAAAAATTTTCCTAAA | | |
| | TTACTTTTAGCCCTGTTCCTGTATTGGGTAATGGCCTTTATTACAAAAACAATAAAATTGGTTAAG | | |
| | TACTGTCAGTCTGGCTTGGACATATCAAACCTGCGTTTCTGCATCACAGGCATGATAATCATCTTG | | |
| | AATGGGCTCTTGATGGCTGTGGAGATCAATGTCATTCGAGTCAGGAGATATGTATTTTTCATGAAT | | |
| | CTCCACAAAGTAAAGCCTCCTGAAGACCTCCAGGATCTGGGAGTGAGATTTCTTCAACCATTTGTG | | |
| | AATTTGCTGTCAAAAGCAACATACTGGTGGATGAACACACTTATTATATCTGCTCACAAAAAGCCT | | |
| | ATTGATCTGAAGGCAATTGGAAAATTGCCAATAGCAATGAGAGCAGTAACAAATTATGTTTGCCTG | | |
| | AAAGATGCATATGAAGAACAAAAGAAAAAAGTTGCAGATCATCCAAATCGGACTCCATCTATATGG | | |
| | CTTGCAATGTACAGAGCTTTTGGGCGACCAATTCTACTTAGTAGCACATTCCGCTATCTAACTGAT | | |
| | TTACTGGGTTTTGCTGGACCTCTTTGTATTTCTGGAATAGTTCAGCGTGTGAATGAAACCCAGAAT | | |
| | GGGACAAATAACACAACTGGAATTTCAGAAACCCTCTCATCAAAGGAATTTCTTGAAAACGCTTAC | | |
| | GTTCTAGCAGTTCTTCTCTTCTTGGCTCTTATTCTGCAAAAGACATTTTTGAAGGCTTCCTACTAT | | |
| | GTAACCATAGACACTGGCATTAACCTCCGTGGAGCTCTGCTGGCCATGATTTATAATAAAATCCTT | | |
| | AGGCTCTCTACGTCTAACTTATCCATGGGGGAGATGACTCTGGGGCAGATCAACAACTTAGTCGCC | | |
| | ATTGAAACTAATCAACTCATGTGGTTTTTGTTCCTGTGTCCCAATCTATGGGCTATGCCTGTTCAG | | |
| | ATCATAATGGGCGTGATTCTGCTCTATAATTTACTTGGATCAAGTGCATTGGTCGGTGCAGCTGTC | | |
| | ATTGTGCTCCTTGCGCCAATTCAGTACTTTATTGCTACAAAGTTGGCAGAGGCTCAGAAAAGTACA | | |
| | CTTGATTATTCCACTGAGAGACTCAAGAAAACAAATGAAATATTGAAAGGCATCAAACTTCTAAAA | | |
| | TTGTATGCCTGGGAACACATTTTCTGCAAAAGTGTGGAGGAAACAAGAATGAAAGAACTATCTAGT | | |
| | CTCAAAACCTTTGCACTATATACATCACTCTCCATCTTCATGAATGCAGCAATTCCCATAGAAGCT | | |
| | GTTCTTGCTACATTTGTGACCCATGCGTATGCCAGTGGAAAATCAATGAAACCTGCAGAGGCCTTT | | |
| | GCTTCACTGTCTCTCTTCCATATCCTGGTCACACCACTGTCCCTGCTCTTCACAATGGTCACATTT | | |
| | GCAGTCAAAGCCATCATAAGTGTTCAAAAGCTGAATGAGTTTCTCTTGAGTGATGACATTGGTGAC | | |
| | GACAGTTGGCGAACTGGTGAAAGTTCGCTTCCTTTTGAGTCCTGTAAGAAGCACACTGGAGTTCAG | | |
| | CCAAAAACTATAAACAGGAAACAGGCCTGGAAGATATCACCTGGACAGCTATGAGCAATAACACGG | | |
| | CGTCTACGTCCCGCAGAAACAGAGGACATTGCAATAAAAGGTCACAATGGATACTTTTCATGGGGC | | |
| | AGTGGTTTAGCTACATTATCCAATATAGATATTCGAATTCCAACAGGTCAGTTAACCATGATTGTG | | |
| | GGCCAAGTACGATGTGGGAAGTCCTCTCTTCTCCTTGCCATCCTCGGTGAGATGCAGACATTAAAA | | |
| | GGAAAAGTTCACTGGAGCAATGTAAATGAATCTGAGCCTTCTTTTGAAGCAACCAGAAGTAGGAAC | | |
| | AGGTACTCTGTGGCATATGCAGCTCAAAAGCCTTGGCTATTAAATGCTACAGTAGAAGAAAATATT | | |
| | ACTTTTGGAAGTCCTTTTAACAAACAGAGGTACAAAGCTGTCACAGATGCCTGTTCTCTTCAGCCA | | |
| | GATATTGACTTATTACCATTTGGACATCAAACTGAAATTGGAGAGAGGGGCATCAACCTGAGTGGG | | |
| | GGACAGAGGCAGAGAATCTGTGTGGCACGAGCGCTGTATCAAAACACCAACATTGTCTTTTTGGAT | | |
| | GATCCATTCTCAGCCCTGGACATTCACTTGAGTGATCATTTAATGCAGGAGGGGATTTTGAAATTC | | |
| | CTGCAAGATGACAAAAGGACACTCGTTCTTGTGACTCACAAATTAAAGTATCTGACGCATGCTGAC | | |
| | TGGATCATAGCCATGAAAGATGGAAGTGTCCTAAGAGAAGGAACTTTGAAGGACATTCAAACCAAA | | |
| | GATGTTGAGCTTTATGAACACTGGAAAACACTTATGAATCGGCAAGATCAAGAATTAGAAAAGGAT | | |
| | ATGGAAGCTGACCAAACTACTTTAGAGAGGAAAACTCTCCGACGGGCCATGTATTCAAGAGAAGCC | | |
| | AAGCCCAGATGGAGGACGAAGACGAAGAGAAAAGAAGAGGAGGAAGATGAGGATGATAACATGTCC | | |
| | ACTGTAATGAGGCTCAGGACTAAAATGCCATCGAAAACCTGCTAACGCTACCTGACATCTAAAAAA | | |
| | TTCTTCCTGCTCATCCTGATGATTTTCTCTAAGCTTTTGAAGCATTCGGTCATTGTAGCTATAGAC | | |
| | TATTGGCTGGCCACATGGACATCGGAGTACAGTATAAACAATACTGGAAAAGCTGATCAGACCTAC | | |
| | TATGTGGCTGGCTTTAGCATACTCTGTGGAGCAGGCATTTTCCTTTGCCTTGTTACATCCCTCACT | | |
| | GTAGAATGGATGGGTCTCACAGCTGCCAAAAATCTTCACCACAACCTTCTCAATAAGATAATCCTT | | |
| | GGACCAATAGGTTTTTTGATACCACACCCCTGGGAACTGATTCTCAATCGCTTTTCAGCTGATACT | | |
| | AATATCATTGATCAGCACATCCCTCCAACCTTGGAATCTCTAACTCGCTCAAAACTGCTCTGCCTG | | |
| | TCTCCCATTGGGATGATTTCTTATGCTACTCCTGTGTTCCTGGTTGCTCTCCTGCCCCTTGGTGTT | | |
| | GCCTTTTATTTTATCCAGAAATACTTTCGGGTTGCCTCTAAGGACCTCCAGGAACTCGACGATAGT | | |
| | ACCCAGCTCCCTCTGCTCTGTCACTTCTCAGAAACAGCAGAAGGACTCACCACCATTCGAACCTTT | | |
| | AGGCATGAAACCAGATTTAAACAACGTATGCTGGAACTGACGGATACAAACAACATTGCCTACTTA | | |
| | TTTCTCTCAGCTGCCAACAGATGGCTGGAGGTCAGGACAAATTATCTGAAAGCTTGCATTGTCCTC | | |
| | ACTGCATCTATAGCATCCATTAGTGGGTCTTCCAATTCTAAATTAATAAACTTGGGTCTTCTGTAT | | |
| | GCACTTACGATAACCAATTATTTGAATTGGGTTGTGAGGAACTTGGCTGACCTGGAGGTCCAGATG | | |
| | GGTGCAGTGAAGAAGGTGAACAGTTTCCTGACTATGGAGTCAGAGAACTATGAAGGCACAATGGAT | | |
| | CCTTCTCAAGTTCCAGAACATTGGCCACAAGAAGGGGAGATCAAGATACATGATCTGTGTGTCAGA | | |
| | TATGAAAATAATCTGAAACCTGTTCTTAAGCACGTCAAGGCTTACATAAATCACCTGGACAAAATG | | |
| | GGCATATGTGGTCGCACTGGCAGTGGGAAATCATCGTTATCTCTAACTTTCTTAAGAATAATTGAT | | |
| | ATATTTGATGGAAAAATTGTCATTGATGGGATAGACATTTCCAAATTACCACTGCACACACTACGT | | |
| | TCTAGACTTTCAATCATTCTGCAGGATCCAATACTATTCAGTGGTTCCATTAGATTTAATTTAGAT | | |
| | CCAGAGTGCAAATGCACAGATGACAGACTCTGGGAAGCCTTAGAAATTGCTCAGCTGAAGAATATG | | |
| | GTCAAATCTCTACCTGGAGGTCTAGATGCGGTTGTCACTGAAGGTGGGGAGAATTTTAGCGTGGGA | | |
| | CAGAGACAGCTATTTTGCCTTGCCAGGGCCTTTGTCCGCAAAAGCAGCATTCTTATTATGGATGAG | | |
| | GCAACAGCTTCCATTGACATGGCCACAGAGAATATTTTGCAAAAAGTAGTAATGACAGCCTTTGAA | | |
| | GACCGGACCGTGGTGACAATGGCTCACCGTGTCTCTTCTATTATAAATGAAGGCCTTGTTTTAGTC | | |
| | TTTTCTGAGGGTATTTTAGTGGAGTGTGATACTGTCCCAAATTTGTTCGCCCACAAGAATGGCCCC | | |
| | TTTTCCACTTTGGTGATGACCAACAAGTAG | | |
| | OFR Start: ATG at 1 | | ORF Stop: TAG at 4648 |
| | SEQ ID NO:38 | 1549 aa | MW at 174257.3 kD |

| | |
|---|---|
| NOV9a, | MSLSFCGNNISSYNINDGVLQMSCPVDALNLVPHVFLLFITFPILFIGWOSQSSAAQTHAATWLHF |
| CG154077-01 | |
| Protein Sequence | PGHNLRWILTFALLFVHVCEIAEGIVSDSRRESRHLHLFMPAVMGFVATTTSIVYYHNIETSNFPK |
| | LLLALFLYWVMAFITKTTKLVKYCQSGLDISNLRFCITGMMVILNGLLMAVEINVIRVRRYVFFMN |
| | PQKVKPPEDLQDLGVRFLQPFVNLLSKATYWWMNTLIISAHKKPIDLRATGKLPIAMRAVTNYVCL |
| | KDAYEEQKkKDHPNRTPSIWIAAAMYRAFGRPILLSSTFRYLAALLGFAGPLCISGIVQRVNETQN |
| | GTNNTTGISETLSSKEFLENAYVLAVLLFAALILQRTFLQASYYVTIETGINLRGALLAMIYNKIL |
| | RLSTSNLSMGEMTLGQINNLVAIETNQLMWFLFLCPNLWAAPVQIIMGVILLYNLLGSSALVGAAV |
| | IVLLAPIQYFIATKLAEAQKSTLDYSTERLKKTNETLKGIKLLKLYAWEHIFCKSVEETRMKELSS |
| | LKTFALYTSLSIFMNAAIPIAAVLATFVTHAYASGNNLKPAEAFASLSLFHILVTPLSLLFTAARF |
| | AVKAIISVQKLNEFLLSDEIGDDSWRTGESSLPFESCKKHTGVQPKTINRKQPGNYHLDSYEQSTR |
| | RLRPAETEDIAIKVTNGYFSWGSGLATLSNIDIRIPTGQLTMIVGQVGCGKSSLLLAILGEMQTLE |
| | GKVHWSNVNESEPSFEATRSRNRYSVAYAAQKPWLLNAAAEENITFGSPFWKQRYKAVTDACSLQP |
| | DIDLLPFGDQTEIGERGINLSGGQRQRICVARALYQNTNIVFLDDPFSALDIHLSDHLMQEGILKF |
| | LQDDKRTLVLVTHKLQYLTHADWIIAMKDGSVLREGTLKDIQTKDVELYEHWKTLMNRQDQELEAA |
| | MEADQTTLERKTLRRAMYSREAKAQMEDEDEEEEEEEDEDDNMSTVMRLRTKMPWKTCWRYLTSSGG |
| | FFLLILMIFSKLLKHSVIVAIDYWLATWTSEYSThNTGKADQTYYVACFSILCGAGIFLCLVTSLT |
| | VEWMGLTAAKNLHHNLLNKIILGPIRFFDTTPLGLILNRFSADTNIIDQHIPPTLESLTRSTLLCL |
| | SAIGMISYATPVFLVALLPLAAAFYFIQKYFRVASAALQELDDSTQLPLLCHPSETAEGLTTIAAF |
| | RHETRFKQRMLELTDTNNIAYLFLSAANRWLEVRTDYLGACIVLTASIASISGSSNSGLVGLGLLY |
| | ALTITNYLNWVVRNLADLEVQMGAVKKVNSFLTMESENYEGTMDPSOVPEHWPQEGEIKIHDLCVR |
| | YENNLKPVLKHVKAYIKPGQKVGICGRTGSGKSSLSLAFFRMVDIFDGKIVIDGIDISKLPLHTLR |
| | SRLSIILQDPILFSGSIRFNLDPECKCTDDRLWEALEIAQLKNMVKSLPGGLDAAATEAAEWFSVG |
| | QRQLFCLARAFVRKSSILIMDEATASIDMATENILQKVVMTAFADRTVVTMAHRVSSIMDAGLVLV |
| | FSEGILVECDTVPNLFAHKNGPFSTLVMTNK |

[0404] Further analysis of the NOV9a protein yielded the following properties shown in Table 9B.

TABLE 9B
Protein Sequence Properties NOV9a

| SignalP | Cleavage site between residues 54 and 55 | | | | |
|---|---|---|---|---|---|
| analysis: | | | | | |
| PSORT II | PSG: a new signal peptide prediction method | | | | |
| analysis: | N-region: length 0; pos. chg 0; neg. chg 0 | | | | |
| | H-region: length 16; peak value 4.86 | | | | |
| | PSG score: 0.46 | | | | |
| | GvH: von Heijne's method for signal seq. recognition | | | | |
| | GvH score (threshold: −2.1): −5.02 | | | | |
| | possible cleavage site: between 48 and 49 | | | | |
| | >>> Seems to have no N-terminal signal peptide | | | | |
| | ALOM: Klein et al's method for TM region allocation | | | | |
| | Init position for calculation: 1 | | | | |
| | Tentative number of TMS(s) for the threshold 0.5: 17 | | | | |
| | INTEGRAL | Likelihood = | −7.59 | Transmembrane | 31-47 |
| | INTEGRAL | Likelihood = | −1.49 | Transmembrane | 71-87 |
| | INTEGRAL | Likelihood = | −1.12 | Transmembrane | 104-120 |
| | INTEGRAL | Likelihood = | −3.72 | Transmembrane | 130-146 |
| | INTEGRAL | Likelihood = | −5.15 | Transmembrane | 167-183 |
| | INTEGRAL | Likelihood = | −1.75 | Transmembrane | 306-322 |
| | INTEGRAL | Likelihood = | −6.95 | Transmembrane | 353-369 |
| | INTEGRAL | Likelihood = | −0.43 | Transmembrane | 433-449 |
| | INTEGRAL | Likelihood = | −7.43 | Transmembrane | 451-467 |
| | INTEGRAL | Likelihood = | −5.04 | Transmembrane | 540-556 |
| | INTEGRAL | Likelihood = | −4.62 | Transmembrane | 580-596 |
| | INTEGRAL | Likelihood = | 0.10 | Transmembrane | 703-719 |
| | INTEGRAL | Likelihood = | −3.24 | Transmembrane | 993-1009 |
| | INTEGRAL | Likelihood = | −7.48 | Transmembrane | 1036-1052 |
| | INTEGRAL | Likelihood = | −6.64 | Transmembrane | 1133-1149 |
| | INTEGRAL | Likelihood = | −0.85 | Transmembrane | 1226-1242 |
| | INTEGRAL | Likelihood = | −1.70 | Transmembrane | 1509-1525 |
| | PERIPHERAL | Likelihood = | 1.22 (at 1246) | | |
| | ALOM score: −7.59 (number of TMSs: 17) | | | | |
| | MTOP: Prediction of membrane topology (Hartmann et al.) | | | | |
| | Center position for calculation: 38 | | | | |
| | Charge difference: 3.5 C(3.0)-N(−0.5) | | | | |
| | C > N: C-terminal side will be inside | | | | |
| | >>>Caution: Inconsistent mtop result with signal peptide | | | | |
| | >>> membrane topology: type 3b | | | | |
| | MITDISC: discrimination of mitochondrial targeting seq | | | | |
| | R content: | 0 | Hyd Moment (75): | 4.83 | |
| | Hyd Moment (95): | 3.17 | G content: | 1 | |
| | D/E content: | 1 | S/T content: | 4 | |
| | Score: −4.79 | | | | |
| | Gavel: prediction of cleavage sites for mitochondrial preseq | | | | |
| | cleavage site motif not found | | | | |
| | NUCDISC: discrimination of nuclear localization signals | | | | |
| | pat4: none | | | | |
| | pat7: none | | | | |
| | bipartite: none | | | | |
| | content of basic residues: 9.6% | | | | |
| | NLS Score: −0.47 | | | | |
| | KDEL: ER retention motif in the C-terminus: none | | | | |
| | ER Membrane Retention Signals: none | | | | |
| | SKL: peroxisomal targeting signal in the C-terminus: none | | | | |
| | PTS2: 2nd peroxisomal targeting signal: none | | | | |
| | VAC: possible vacuolar targeting motif: found | | | | |
| | KLPI at 250 | | | | |
| | RNA-binding motif: none | | | | |
| | Actinin-type actin-binding motif: | | | | |
| | type 1: none | | | | |
| | type 2: none | | | | |
| | NMYR: N-myristoylation pattern: none | | | | |
| | Prenylation motif: none | | | | |
| | memYQRL: transport motif from cell surface to Golgi: none | | | | |
| | Tyrosines in the tail: none | | | | |
| | Dileucine motif in the tail: none | | | | |
| | checking 63 PROSITE DNA binding motifs: none | | | | |
| | checking 71 PROSITE ribosomal protein motifs: none | | | | |
| | checking 33 PROSITE prokaryotic DNA binding motifs: none | | | | |
| | NNCN: Reinhardt's method for Cytoplasmic/Nuclear | | | | |
| | discrimination | | | | |
| | Prediction: cytoplasmic | | | | |
| | Reliability: 94.1 | | | | |
| | COIL: Lupas's algorithm to detect coiled-coil regions | | | | |
| | 918 | Q | 0.59 | | |
| | 919 | E | 0.64 | | |
| | 920 | L | 0.64 | | |
| | 921 | E | 0.64 | | |
| | 922 | K | 0.64 | | |
| | 923 | D | 0.64 | | |
| | 924 | M | 0.64 | | |
| | 925 | E | 0.64 | | |
| | 926 | A | 0.64 | | |
| | 927 | D | 0.64 | | |
| | 928 | Q | 0.64 | | |
| | 929 | T | 0.64 | | |
| | 930 | T | 0.64 | | |
| | 931 | L | 0.64 | | |
| | 932 | E | 0.64 | | |
| | 933 | R | 0.64 | | |
| | 934 | K | 0.64 | | |
| | 935 | T | 0.64 | | |
| | 936 | L | 0.64 | | |
| | 937 | R | 0.64 | | |
| | 938 | R | 0.64 | | |
| | 939 | A | 0.77 | | |
| | 940 | M | 0.77 | | |
| | 941 | Y | 0.77 | | |
| | 942 | S | 0.77 | | |
| | 943 | R | 0.81 | | |
| | 944 | E | 0.81 | | |
| | 945 | A | 0.81 | | |
| | 946 | K | 0.81 | | |
| | 947 | A | 0.81 | | |
| | 948 | Q | 0.81 | | |
| | 949 | M | 0.81 | | |
| | 950 | E | 0.81 | | |
| | 951 | D | 0.81 | | |
| | 952 | E | 0.81 | | |
| | 953 | D | 0.81 | | |
| | 954 | E | 0.81 | | |
| | 955 | E | 0.81 | | |
| | 956 | E | 0.81 | | |
| | 957 | E | 0.81 | | |
| | 958 | E | 0.81 | | |
| | 959 | E | 0.81 | | |
| | 960 | E | 0.81 | | |
| | 961 | D | 0.81 | | |
| | 962 | E | 0.81 | | |
| | 963 | D | 0.81 | | |
| | 964 | D | 0.81 | | |
| | 965 | N | 0.81 | | |
| | 966 | M | 0.81 | | |
| | 967 | S | 0.81 | | |
| | 968 | T | 0.81 | | |
| | 969 | V | 0.81 | | |
| | 970 | M | 0.81 | | |
| | 971 | R | 0.81 | | |
| | 1266 | R | 0.81 | | |
| | 1267 | N | 0.81 | | |
| | 1268 | L | 0.81 | | |
| | 1269 | A | 0.81 | | |
| | 1270 | D | 0.81 | | |
| | 1271 | L | 0.81 | | |
| | 1272 | E | 0.81 | | |
| | 1273 | V | 0.81 | | |
| | 1274 | Q | 0.81 | | |
| | 1275 | M | 0.81 | | |
| | 1276 | G | 0.81 | | |
| | 1277 | A | 0.81 | | |
| | 1278 | V | 0.81 | | |
| | 1279 | K | 0.81 | | |
| | 1280 | K | 0.81 | | |
| | 1281 | V | 0.81 | | |
| | 1282 | N | 0.81 | | |
| | 1283 | S | 0.81 | | |
| | 1284 | F | 0.81 | | |
| | 1285 | L | 0.81 | | |
| | 1286 | T | 0.81 | | |
| | 1287 | M | 0.81 | | |
| | 1288 | E | 0.81 | | |
| | 1289 | S | 0.81 | | |
| | 1290 | E | 0.81 | | |
| | 1291 | N | 0.81 | | |
| | 1292 | Y | 0.81 | | |
| | 1293 | E | 0.81 | | |

total: 82 residues
Final Results (k = 9/23):
77.8%: endoplasmic reticulum
11.1%: mitochondrial
11.1%: vacuolar
>> prediction for CG154077-01 is end (k = 9)

[0405] A search of the NOV9a protein against the Geneseq database, a proprietary database that contains sequences published in patents and patent publication, yielded several homologous proteins shown in Table 9C.

TABLE 9C
Geneseq Results for NOV9a

| | | | Identities/ | |
|---|---|---|---|---|
| | | | Similarities for | |
| Geneseq | Protein/Organism/Length | NOV9a Residues/ | the Matched | Expect |
| Identifier | [Patent #, Date] | Match Residues | Region | Value |
| ABP52116 | Homo sapiens ABC transporter | 1 . . . 1549 | 1549/1549 (100%) | 0.0 |
| | ABCC9 protein SEQ ID NO: 68 - | 1 . . . 1549 | 1549/1549 (100%) | |
| | Homo sapiens, 1549 aa. | | | |
| | [EP1217066-A1, 26 JUN. 2002] | | | |
| AAW53602 | Rat sulphonylurea receptor SUR2 | 1 . . . 1549 | 1493/1549 (96%) | 0.0 |
| | protein - Rattus sp, 1545 aa. | 1 . . . 1545 | 1517/1549 (97%) | |
| | [JP10052275-A, 24 FEB. 1998] | | | |
| AAM23694 | Human EST encoded protein SEQ | 425 . . . 1549 | 1123/1125 (99%) | 0.0 |
| | ID NO: 1219 - Homo sapiens, 1125 | 1 . . . 1125 | 1123/1125 (99%) | |
| | aa. [WO200154477-A2, | | | |
| | 02 AUG. 2001] | | | |
| ABP52115 | Homo sapiens ABC transporter | 1 . . . 1549 | 1055/1582 (66%) | 0.0 |
| | ABCC8 protein SEQ ID NO: 67 - | 1 . . . 1581 | 1259/1582 (78%) | |
| | Homo sapiens, 1581 aa. | | | |
| | [EP1217066-A1, 26 JUN. 2002] | | | |
| AAR77087 | Rat sulphonylurea receptor - Rattus | 1 . . . 1549 | 1048/1588 (65%) | 0.0 |
| | sp, 1582 aa. [WO9528411-A1, | 1 . . . 1582 | 1254/1588 (77%) | |
| | 26 OCT. 1995] | | | |

[0406] In a BLAST search of public sequence databases, the NOV9a protein was found to have homology to the proteins shown in the BLASTP data in Table 9D.

TABLE 9D
Public BLASTP Results for NOV9a

| | | | Identities/ | |
|---|---|---|---|---|
| Protein | | | Similarities for | |
| Accession | | NOV9a Residues/ | the Matched | Expect |
| Number | Protein/Organism/Length | Match Residues | Portion | Value |
| O60706 | Sulfonylurea receptor 2 - Homo | 1 . . . 1549 | 1549/1549 (100%) | 0.0 |
| | sapiens (Human), 1549 aa. | 1 . . . 1549 | 1549/1549 (100%) | |
| P82451 | Sulfonylurea receptor 2 - | 1 . . . 1549 | 1514/1549 (97%) | 0.0 |
| | Oryctolagus cuniculus (Rabbit), | 1 . . . 1549 | 1527/1549 (97%) | |
| | 1549 aa. | | | |
| Q95J92 | Sulphonylurea receptor 2B - | 1 . . . 1545 | 1491/1545 (96%) | 0.0 |
| | Oryctolagus cuniculus (Rabbit), | 1 . . . 1545 | 1514/1545 (97%) | |
| | 1549 aa. | | | |
| Q63563 | Sulfonylurea receptor 2 - Rattus | 1 . . . 1549 | 1496/1549 (96%) | 0.0 |
| | norvegicus (Rat), 1545 aa. | 1 . . . 1545 | 1518/1549 (97%) | |
| P70170 | Sulfonylurea receptor 2 - Mus | 1 . . . 1549 | 1494/1549 (96%) | 0.0 |
| | musculus (Mouse), 1546 aa. | 1 . . . 1546 | 1513/1549 (97%) | |

[0407] PFam analysis predicts that the NOV9a protein contains the domains shown in the Table 9E.

TABLE 9E
Domain Analysis of NOV9a

| | | Identities/ | |
|---|---|---|---|
| | | Similarities for | |
| Pfam | NOV9a | the Matched | Expect |
| Domain | Match Region | Region | Value |
| ABC_membrane | 297 . . . 585 | 53/298 (18%) | 7.8e−33 |
| | | 217/298 (73%) | |
| ABC_tran | 698 . . . 888 | 58/202 (29%) | 4.7e−44 |
| | | 144/202 (71%) | |
| ABC_membrane | 994 . . . 1266 | 49/285 (17%) | 5.6e−37 |
| | | 195/285 (68%) | |
| ABC_tran | 1339 . . . 1522 | 52/199 (26%) | 5.9e−36 |
| | | 135/199 (68%) | |

### Example 10

[0408] The NOV10 clone was analyzed, and the nucleotide and encoded polypeptide sequences are shown in Table 10A.

TABLE 10A
NOV10 Sequence Analysis

| | SEQ ID NO:39 | 941 bp | |
|---|---|---|---|
| NOV10a, | GACATGGAACAGGATAATACAACATTGCTGACAGAGTTTGTTCTCACAGGACTTACATATCAGCCA | | |
| CG155759-02 | | | |
| DNA Sequence | GAGTGGAAAATGCCCCTGTTCTTCGTGTTCTTGGTGATCTATCTCATCACTATTGTGTGGAACCTT | | |
| | GGTCTGATTGCTCTTATCTCGAATGACCCACAACTTCACATCCCCATGTACTTTTTTCTTGGGAGT | | |
| | TTAGCCTTTGTTGATGCTTGGATATCTTCCACAGTAACTCCCAAAATGTTGGTTAATTTCTTGGCC | | |
| | AAAAACAGGATGATATCTCTGTCTGAATGCATGATTCAATTTTTTTCCTTTGCATTTGGTGGAACT | | |
| | ACAGAATGTTTTCTCTTGGCAACAATGGCATATGATCGCTATGTAGCCATATGCAAACCTTTACTA | | |
| | TATCCAGTGATTATGAACAATTCACTATGCATACGGCTGTTAGCCTTCTCATTTTTAGGTGGCTTC | | |
| | CTCCATGCCTTAATTCATGAAGTCCTTATATTCAGATTAACCTTCTGCAATTCTAACATAATACAT | | |
| | CATTTTTACTGTGATATTATACCACTGTTTATGATTTCCTGTACTGACCCTTCTATTAATTTTCTA | | |
| | ATGGTTTTTATTTTGTCTGGCTCAATTCAGGTATTCACCATTGTGACAGTTCTTAATTCTTACACA | | |
| | TTTGCTCTTTTCACAATCCTAAAAAAGAAGTCTGTTAGAGGCGTAAGGAAAGCCTTTTCCACCTGT | | |
| | GGAGCCCATCTCTTATCTGTCTCTTTATATTATGGCCCACTTATCTTCATCTATTTGCGCCCTGCA | | |
| | TCTCCACAAGCAGATGACCAGGATATGATAGACTCTGTCTTTTATACAATCATAATTCCTTTGCTA | | |
| | AATCCCATTATCTACAGTCTGAGAAATAAACAAGTAATAGATTCATTCACAAAAATGGTAAAAAGA | | |
| | AATGTTTAGATTTCATA | | |
| | ORF Start: ATG at 4 | | ORF Stop: TAG at 931 |
| | SEQ ID NO:40 | 309 aa | Mw at 35396.8 kD |
| NOV10a, | MEQDNTTLLTEFVLTGLTYQPEWKMPLFLVFLVIYLITIVWNLGLIALIWNOPQLHIPMYFFLGSL | | |
| CG155759-02 | | | |
| Protein Sequence | AFVDAWISSTVTPKMLVNFLAKNRMISLSECMIQFFSFAFGGTTECPLLATMAYDRYVAICKPLLY | | |
| | PVIMNNSLCIRLLAPSFLGGFLHALIHEVLIFRLTFCNSNIIHHFYCDIIPLPMTSCTDPSINFLM | | |
| | VFILSGSIQVFTIVTVLNSYTFALFTILKKKSVRGVRKAFSTCGAHLLSVSLYYGPLIEMYLRPAS | | |
| | PQADDQDMIDSVFYTIIIPLLNPIIYSLPNKQVIDSFTKMVKRNV | | |
| | SEQ ID NO:41 | 941 bp | |
| NOV10b, | GACATGGAACAGGATAATACAACATTGCTGACAGAGTTTGTTCTCACAGGACTTACATATCAGCCA | | |
| CG155759-01 | | | |
| DNA Sequence | GAGTGGAAAATGCCCCTGTTCTTGGTGTTCTTGGTGATCTATCTCATCACTATTGTGTGGAACCTT | | |
| | GGTCTGATTGCTCTTATCTGGAATCACCCACAACTTCACATCCCCATGTACTTTTTTCTTGGGAGT | | |
| | TTAGCCTTTGTTGATGCTTGGATATCTTCCACAGTAACTCCCAAAATGTTGGTTAATTTCTTCGCC | | |
| | AAAAACAGGATGATATCTCTGTCTGAATGCATGATTCAATTTTTTTCCTTTGCATTTGGTGGAACT | | |
| | ACAGAATGTTTTCTCTTGGCAACAATGGCATATGATCGCTATGTAGCCATATGCAAACCTTTACTA | | |
| | TATCCAGTGATTATGAACAATTCACTATGCATACGGCTGTTAGCCTTCTCATTTTTAGGTGGCTTC | | |
| | CTCCATGCCTTAATTCATGAAGTCCTTATATTCAGATTAACCTTCTGCAATTCTAACATAATACAT | | |
| | CATTTTTACTGTGATATTATACCACTGTTTATGATTTCCTGTACTGACCCTTCTATTAATTTTCTA | | |
| | ATGGTTTTTATTTTGTCTGGCTCAATTCAGGTATTCACCATTGTGACAGTTCTTAATTCTTACACA | | |
| | TTTGCTCTTTTCACAATCCTAAAAAAGAAGTCTGTTAGAGGCGTAAGGAAAGCCTTTTCCACCTGT | | |
| | GGAGCCCATCTCTTATCTGTCTCTTTATATTATGGCCCACTTATCTTCATGTATTTGCGCCCTGCA | | |
| | TCTCCACAAGCAGATCACCAAGATATGATAGACTCTGTCTTTTATACAATCATAATTCCTTTGCTA | | |
| | AATCCCATTATCTACAGTCTGAGAAATAAACAAGTAATAGATTCATTCACAAAAATGGTAAAAAGA | | |
| | AATGTTTAGATTTCATA | | |
| | ORF Start: ATG at 4 | | ORF Stop: TAG at 931 |
| | SEQ ID NO:42 | 309 aa | MW at 35396.8 kD |

| | |
|---|---|
| NOV10b, | MEQNTTLLTEFVLTGLTYQPEWKMPLFLVFLVIVYLITIVWNLGLIALIWNDPQLHIPMYFFLGSL |
| CG155759-01 | |
| Protein Sequence | AFVDAWISSTVTPKMLVNFLAKNRMISLSECMIQFFSFAFGGTTECFLLATMAYDRYVAICKPLLY |
| | PVIMNNSLCIRLLAFSFLGGFLHALIHEVLIFRLTFCNSNIIHHFYCDIIPLFMISCTDPSINFLM |
| | VFILSGSIQVFTIVTVLNSYTFALFTILKKKSVRGVRKAFSTCGAHLLSVSLYYGPLIFMYLRPAS |
| | PQADDQDMIDSVFYTIIIPLLNPIIYSLRNKQVIDSFTKMVKRNV |

[0409] Sequence comparison of the above protein sequences yields the following sequence relationships shown in Table 10B.

TABLE 10B
Comparison of NOV10a against NOV10b.

| | | Identities/ |
|---|---|---|
| | | Similarities for |
| Protein | NOV10a Residues/ | the Matched |
| Sequence | Match Residues | Region |
| NOV10b | 1 . . . 309 | 309/309 (100%) |
| | 1 . . . 309 | 309/309 (100%) |

[0410] Further analysis of the NOV10a protein yielded the following properties shown in Table 10C.

TABLE 10C
Protein Sequence Properties NOV10a

| SignalP | Cleavage site between residues 52 and 53 | | | | |
|---|---|---|---|---|---|
| analysis: | | | | | |
| PSORT II | PSG: a new signal peptide prediction method | | | | |
| analysis: | N-region: length 11; pos. chg 0; neg. chg 3 | | | | |
| | H-region: length 10; peak value 0.00 | | | | |
| | PSG score: −4.40 | | | | |
| | GvH: von Heijne's method for signal seq. recognition | | | | |
| | GvH score (threshold: −2.1): −3.77 | | | | |
| | possible cleavage site: between 38 and 39 | | | | |
| | >>> Seems to have no N-terminal signal peptide | | | | |
| | ALOM: Klein et al's method for TM region allocation | | | | |
| | Init position for calculation: 1 | | | | |
| | Tentative number of TMS(s) for the threshold 0.5: 5 | | | | |
| | INTEGRAL | Likelihood = | −9.24 | Transmembrane | 25-41 |
| | INTEGRAL | Likelihood = | 0.37 | Transmembrane | 57-73 |
| | INTEGRAL | Likelihood = | −2.02 | Transmembrane | 142-158 |
| | INTEGRAL | Likelihood = | −5.79 | Transmembrane | 196-212 |
| | INTEGRAL | Likelihood = | −1.70 | Transmembrane | 276-292 |
| | PERIPHERAL | Likelihood = | 0.90 (at 173) | | |
| | ALOM score: −9.24 (number of TMSs: 5) | | | | |
| | MTOP: Prediction of membrane topology (Hartmann et al.) | | | | |
| | Center position for calculation: 32 | | | | |
| | Charge difference: 0.5 C(−0.5)-N(−1.0) | | | | |
| | C > N: C-terminal side will be inside | | | | |
| | >>> membrane topology: type 3b | | | | |
| | MITDISC: discrimination of mitochondrial targeting seq | | | | |
| | R content: | 0 | Hyd Moment (75): | 6.20 | |
| | Hyd Moment (95): | 3.11 | G content: | 0 | |
| | D/E content: | 2 | S/T content: | 0 | |

Score: −7.39
Gavel: prediction of cleavage sites for mitochondrial preseq
cleavage site motif not found
NUCDISC: discrimination of nuclear localization signals
pat4: none
pat7: none
bipartite: none
content of basic residues: 6.5%
NLS Score: −0.47
KDEL: ER retention motif in the C-terminus: none
ER Membrane Retention Signals:
KKXX-like motif in the C-terminus: VKRN
SKL: peroxisomal targeting signal in the C-terminus: none
PTS2: 2nd peroxisomal targeting signal: none
VAC: possible vacuolar targeting motif: none
RNA-binding motif: none
Actinin-type actin-binding motif:
type 1: none
type 2: none
NMYR: N-myristoylation pattern: none
Prenylation motif: none
memYQRL: transport motif from cell surface to Golgi: none
Tyrosines in the tail: none
Dileucine motif in the tail: none
checking 63 PROSITE DNA binding motifs: none
checking 71 PROSITE ribosomal protein motifs: none
checking 33 PROSITE prokaryotic DNA binding motifs: none
NNCN: Reinhardt's method for Cytoplasmic/Nuclear
discrimination
Prediction: cytoplasmic
Reliability: 94.1
COIL: Lupas's algorithm to detect coiled-coil regions
total: 0 residues
Final Results (k = 9/23):
33.3%: endoplasmic reticulum
11.1%: mitochondrial
11.1%: Golgi
11.1%: vacuolar
11.1%: nuclear
11.1%: vesicles of secretory system
11.1%: cytoplasmic
>> prediction for CG155759-02 is end (k = 9)

[0411] A search of the NOV10a protein against the Geneseq database, a proprietary database that contains sequences published in patents and patent publication, yielded several homologous proteins shown in Table 10D.

TABLE 10D
Geneseq Results for NOV10a

| | | | Identities/ | |
|---|---|---|---|---|
| | | | Similarities for | |
| Geneseq | Protein/Organism/Length | NOV10a Residues/ | the Matched | Expect |
| Identifier | [Patent #, Date] | Match Residues | Region | Value |
| AAB71190 | Human GPCRX protein SEQ ID 56 - | 1 . . . 309 | 309/309 (100%) | e−180 |
| | Homo sapiens, 309 aa. | 1 . . . 309 | 309/309 (100%) | |
| | [WO200250275-A2, 27 JUN. 2002] | | | |
| AAU85253 | G-coupled olfactory receptor #114 - | 1 . . . 309 | 309/309 (100%) | e−180 |
| | Homo sapiens, 314 aa. | 6 . . . 314 | 309/309 (100%) | |
| | [WO200198526-A2, 27 DEC. 2001] | | | |
| AAU95610 | Human olfactory and pheromone G | 1 . . . 309 | 309/309 (100%) | e−180 |
| | protein-coupled receptor #97 - Homo | 6 . . . 314 | 309/309 (100%) | |
| | sapiens, 314 aa. [WO200224726-A2, | | | |
| | 28 MAR. 2002] | | | |
| AAG72474 | Human OR-like polypeptide query | 1 . . . 309 | 309/309 (100%) | e−180 |
| | sequence, SEQ ID NO: 2155 - Homo | 6 . . . 314 | 309/309 (100%) | |
| | sapiens, 314 aa. [WO200127158-A2, | | | |
| | 19 APR. 2001] | | | |
| AAG71500 | Human olfactory receptor | 1 . . . 309 | 309/309 (100%) | e−180 |
| | polypeptide, SEQ ID NO: 1181 - | 6 . . . 314 | 309/309 (100%) | |
| | Homo sapiens, 314 aa. | | | |
| | [WO200127158-A2, 19 APR. 2001] | | | |

[0412] In a BLAST search of public sequence databases, the NOV10a protein was found to have homology to the proteins shown in the BLASTP data in Table 10E.

TABLE 10E
Public BLASTP Results for NOV10a

| | | | Identities/ | |
|---|---|---|---|---|
| Protein | | | Similarities for | |
| Accession | | NOV10a Residues/ | the Matched | Expect |
| Number | Protein/Organism/Length | Match Residues | Portion | Value |
| Q8NGV7 | Seven transmembrane helix | 1 . . . 309 | 309/309 (100%) | e−179 |
| | receptor - Homo sapiens (Human), | 6 . . . 314 | 309/309 (100%) | |
| | 314 aa. | | | |
| Q8VG48 | Olfactory receptor MOR183-1 - | 4 . . . 308 | 232/305 (76%) | e−141 |
| | Mus musculus (Mouse), 309 aa. | 4 . . . 308 | 272/305 (89%) | |
| Q8VEX5 | Olfactory receptor MOR183-9 - | 1 . . . 309 | 239/309 (77%) | e−139 |
| | Mus musculus (Mouse), 309 aa. | 1 . . . 309 | 270/309 (87%) | |
| CAD37583 | Sequence 195 from Patent | 1 . . . 309 | 241/309 (77%) | e−139 |
| | WO0224726 - Homo sapiens | 17 . . . 325 | 267/309 (85%) | |
| | (Human), 325 aa. | | | |
| Q8NGV6 | Seven transmembrane helix | 1 . . . 309 | 241/309 (77%) | e−139 |
| | receptor - Homo sapiens (Human), | 1 . . . 309 | 267/309 (85%) | |
| | 309 aa. | | | |

[0413] PFam analysis predicts that the NOV10a protein contains the domains shown in the Table 10F.

TABLE 10F
Domain Analysis of NOV10a

| | | Identities/ | |
|---|---|---|---|
| | | Similarities for | |
| Pfam | NOV10a | the Matched | Expect |
| Domain | Match Region | Region | Value |
| 7tm_1 | 41 . . . 290 | 44/271 (16%) | 3.6e−22 |
| | | 174/271 (64%) | |

### Example 11.

[0414] The NOV11 clone was analyzed, and the nucleotide and encoded polypeptide sequences are shown in Table 11A.

TABLE 11A
NOV11 Sequence Analysis

| | SEQ ID NO:43 | 959 bp | |
|---|---|---|---|
| NOV11a, | TCTGAGGCAATGAATGGAATGAATCACTCTGTGGTATCAGAATTTGTATTCATGGGACTCACCAAC | | |
| CG155882-01 | | | |
| DNA Sequence | TCACGGGAGATTCAGCTTCTACTTTTTGTTTTCTCTTTGTTGTTCTACTTTGCGAGCATGATGGGA | | |
| | AACCTTGTCATTGTATTCACTGTAACCATGGATGCTCATCTGCACTCCCCCATGTATTTCCTCCTG | | |
| | GCTAACCTCTCAATCATTGATATGGCATTTTGCTCAATTACAGCCCCTAAGATGATTTGTGATATT | | |
| | TTCAAGAAGCACAAGGCCATCTCCTTTCGGCGATGTATTACTCAGATCTTCTTTAGCCATGCTCTT | | |
| | GGGGGCACTGAGATGGTGCTGCTCATAGCCATGGCCTTTGACAGATACATGGCCATATGTAAACCT | | |
| | CTCCACTACCTGACCATCATGAGCCCAAGAATGTGTCTATACTTTTTAGCCACTTCCTCTATCATT | | |
| | GGCCTTATCCACTCATTGGTCCAATTAGTTTTTGTGGTAGATTTACCTTTTTGTCGTCCTAATATC | | |
| | TTTGACAGTTTTTACTGTGATCTCCCTCGGCTCCTCAGACTTGCCTGTACCAACACCCAAGAACTG | | |
| | GAGTTCATGGTCACTGTCAATAGTGGACTCATTTCTGTGGGCTCCTTTGTCTTGCTGGTAATTTCC | | |
| | TACATCTTCATTCTGTTCACTGTTTGGAAACATTCTTCTGGTGGTCTAGCCAAGCCCCTCTCTACC | | |
| | CTGTCAGCTCATGTCACTGTGGTCATCTTGTTCTTTGGGCCACTGATGTTTTTCTACACATGGCCT | | |
| | TCTCCCACATCACACCTGGATAAATATCTTGCTATTTTTGATGCATTTATTACTCCTTTTCTGAAT | | |
| | CCAGTTATCTACACATTCAGGAACAAAGACATGAAAGTGGCAATGAGGAGACTGTGCAGTCCTCTT | | |
| | GCGCATTTTACAAAGATTTTGTAAATGGCTTGGCT | | |
| | ORF Start: ATG at 10 | | ORF Stop: TAA at 946 |
| | SEQ ID NO:44 | 312 aa | MW at 35368.9 kD |

| | |
|---|---|
| NOV11a, | MNGMNHSVVSEFVFMGLTNSREIQLLLFVFSLLFYFASMMGNLVIVFTVTMDAHLHSPMYFLLANL |
| CG155882-01 | |
| Protein Sequence | SIIDMAFCSITAPKMICDIFKKHKAISFRGCITQIFFSHALGGTEMVLLIAMAFDRYMAICKPLHY |
| | LTIMSPRMCLYFLATSSIIGLIHSLVQLVFVVDLPFCGPNIFDSFYCDLPRLLRLACTNTQELEFM |
| | VTVNSGLISVGSFVLLVISYIFILFTVWKHSSGGLAKALSTLSAHVTVVILFFGPLMFFYTWPSPT |
| | SHLDKYLAIFDAFITPFLNPVIYTTFRKDMKVAMRRLCSRLAHFTKIL |

[0415] Further analysis of the NOV11a protein yielded the following properties shown in Table 11B.

TABLE 11B
Protein Sequence Properties NOV11a

| SignalP analysis: | Cleavage site between residues 42 and 43 | | | | |
|---|---|---|---|---|---|
| PSORT II analysis: | PSG: a new signal peptide prediction method | | | | |
| | N-region: length 11; pos. chg 0; neg. chg 1 | | | | |
| | H-region: length 9; peak value 0.00 | | | | |
| | PSG score: −4.40 | | | | |
| | GvH: von Heijne's method for signal seq. recognition | | | | |
| | GvH score (threshold: −2.1): −2.35 | | | | |
| | possible cleavage site: between 37 and 38 | | | | |
| | >>> Seems to have no N-terminal signal peptide | | | | |
| | ALOM: Klein et al's method for TM region allocation | | | | |
| | Init position for calculation: 1 | | | | |
| | Tentative number of TMS(s) for the threshold 0.5: 6 | | | | |
| | INTEGRAL | Likelihood = | −5.20 | Transmembrane | 25-41 |
| | INTEGRAL | Likelihood = | −1.22 | Transmembrane | 61-77 |
| | INTEGRAL | Likelihood = | 0.10 | Transmembrane | 101-117 |
| | INTEGRAL | Likelihood = | −5.31 | Transmembrane | 150-166 |
| | INTEGRAL | Likelihood = | −8.81 | Transmembrane | 205-221 |
| | INTEGRAL | Likelihood = | −3.72 | Transmembrane | 240-256 |

| PERIPHERAL | Likelihood = | 0.95 (at 270) | |
|---|---|---|---|
| ALOM score: −8.81 (number of TMSs: 6) | | | |
| MTOP: Prediction of membrane topology (Hartmann et al.) | | | |
| Center position for calculation: 32 | | | |
| Charge difference: 1.0 C( 0.0)-N(−1.0) | | | |
| C > N: C-terminal side will be inside | | | |
| >>> membrane topology: type 3b | | | |
| MITDISC: discrimination of mitochondrial targeting seq | | | |
| R content: | 1 | Hyd Moment(75): | 4.78 |
| Hyd Moment(95): | 7.90 | G content: | 2 |
| D/E content: | 2 | S/T content: | 4 |

Score: −5.85
Gavel: prediction of cleavage sites for mitochondrial preseq
cleavage site motif not found
NUCDISC: discrimination of nuclear localization signals
pat4: KKHK (3) at 87
pat7: none
bipartite: none
content of basic residues: 6.7%
NLS Score: −0.29
KDEL: ER retention motif in the C-terminus: none
ER Membrane Retention Signals:
KKXX-like motif in the C-terminus: FTKI
SKL: peroxisomal targeting signal in the C-terminus: none
PTS2: 2nd peroxisomal targeting signal: none
VAC: possible vacuolar targeting motif: none
RNA-binding motif: none
Actinin-type actin-binding motif:
type 1: none
type 2: none
NMYR: N-myristoylation pattern: none
Prenylation motif: none
memYQRL: transport motif from cell surface to Golgi: none
Tyrosines in the tail: none
Dileucine motif in the tail: none
checking 63 PROSITE DNA binding motifs: none
checking 71 PROSITE ribosomal protein motifs: none
checking 33 PROSITE prokaryotic DNA binding motifs: none
NNCN: Reinhardt's method for Cytoplasmic/Nuclear
discrimination
Prediction: cytoplasmic
Reliability: 94.1
COIL: Lupas's algorithm to detect coiled-coil regions
total: 0 residues
Final Results (k = 9/23):
55.6%: endoplasmic reticulum
11.1%: Golgi
11.1%: vacuolar
11.1%: vesicles of secretory system
11.1%: cytoplasmic
>> prediction for CG155882-01 is end (k = 9)

[0416] A search of the NOV11a protein against the Geneseq database, a proprietary database that contains sequences published in patents and patent publication, yielded several homologous proteins shown in Table 11C.

TABLE 11C
Geneseq Results for NOV11a

| | | NOV11a | Identities/ | |
|---|---|---|---|---|
| | | Residues/ | Similarities for | |
| Geneseq | Protein/Organism/Length | Match | the Matched | Expect |
| Identifier | [Patent #, Date] | Residues | Region | Value |
| ABJ04030 | Human G-protein coupled receptor | 1 . . . 312 | 312/312 (100%) | 0.0 |
| | SEQ ID NO: 126 - Homo sapiens, | 1 . . . 312 | 312/312 (100%) | |
| | 312 aa. [WO200255558-A2, | | | |
| | 18 JUL. 2002] | | | |
| AAU85300 | G-coupled olfactory receptor #161 - | 1 . . . 312 | 312/312 (100%) | 0.0 |
| | Homo sapiens, 312 aa. | 1 . . . 312 | 312/312 (100%) | |
| | [WO200198526-A2, 27 DEC. 2001] | | | |
| AAG71908 | Human olfactory receptor | 1 . . . 312 | 312/312 (100%) | 0.0 |
| | polypeptide, SEQ ID NO: 1589 - | 1 . . . 312 | 312/312 (100%) | |
| | Homo sapiens, 312 aa. | | | |
| | [WO200127158-A2, 19 APR. 2001] | | | |
| AAU24680 | Human olfactory receptor | 1 . . . 312 | 312/312 (100%) | 0.0 |
| | AOLFR179 - Homo sapiens, 312 aa. | 1 . . . 312 | 312/312 (100%) | |
| | [WO200168805-A2, 20 SEP. 2001] | | | |
| AAU95651 | Human olfactory and pheromone G | 4 . . . 312 | 309/309 (100%) | e−179 |
| | protein-coupled receptor #138 - | 1 . . . 309 | 309/309 (100%) | |
| | Homo sapiens, 309 aa. | | | |
| | [WO200224726-A2, 28 MAR. 2002] | | | |

[0417] In a BLAST search of public sequence databases, the NOV11a protein was found to have homology to the proteins shown in the BLASTP data in Table 11D.

TABLE 11D
Public BLASTP Results for NOV11a

| | | NOV11a | Identities/ | |
|---|---|---|---|---|
| Protein | | Residues/ | Similarities for | |
| Accession | | Match | the Matched | Expect |
| Number | Protein/Organism/Length | Residues | Portion | Value |
| Q8NGB8 | Seven transmembrane helix | 1 . . . 312 | 312/312 (100%) | e−180 |
| | receptor - Homo sapiens (Human), | 1 . . . 312 | 312/312 (100%) | |
| | 312 aa. | | | |
| CAD37622 | Sequence 275 from Patent | 4 . . . 312 | 309/309 (100%) | e−178 |
| | WO0224726 - Homo sapiens | 1 . . . 309 | 309/309 (100%) | |
| | (Human), 309 aa. | | | |
| Q8VF83 | Olfactory receptor MOR245-5 - | 1 . . . 311 | 267/311 (85%) | e−155 |
| | Mus musculus (Mouse), 320 aa. | 9 . . . 319 | 287/311 (91%) | |
| Q8VET0 | Olfactory receptor MOR245-21 - | 1 . . . 311 | 235/311 (75%) | e−139 |
| | Mus musculus (Mouse), 312 aa. | 1 . . . 311 | 275/311 (87%) | |
| Q8VF10 | Olfactory receptor MOR245-20 - | 4 . . . 305 | 220/302 (72%) | e−133 |
| | Mus musculus (Mouse), 317 aa. | 1 . . . 302 | 261/302 (85%) | |

[0418] PFam analysis predicts that the NOV11a protein contains the domains shown in the Table 11E.

TABLE 11E
Domain Analysis of NOV11a

| | | Identities/ | |
|---|---|---|---|
| | NOV11a | Similarities for | |
| Pfam | Match | the Matched | Expect |
| Domain | Region | Region | Value |
| 7tm_1 | 41 . . . 287 | 53/268 (20%) | 5.2e−26 |
| | | 169/268 (63%) | |

### Example 12.

[0419] The NOV12 clone was analyzed, and the nucleotide and encoded polypeptide sequences are shown in Table 12A.

TABLE 12A
NOV12 Sequence Analysis

| | SEQ ID NO:45 | 981 bp | |
|---|---|---|---|
| NOV12a, | ATGTTCCCGGAGAACATCCAAGATGTGCTATCTGCGCTGCCCAATCCTGATGACTACTTCCTCCTG | | |
| CG159399-01 | | | |
| DNA Sequence | CGCTGGCTCCAAGCTCGGAGCTTTGACCTGCAGAAATCAGAGGACATGCTGAGGAAGCATATGGAG | | |
| | TTCCGGAAGCAACAAGACCTCGCCAACATCCTTGCCTGGCAGCCCCCAGAGGTGGTCAGGCTGTAC | | |
| | AACGCTAACGGCATATGCGGCCACGACGGTGAGGGCAGCCCTGTCTGGTACCACATTGTGGGAAGC | | |
| | CTGGACCCCAAAGGCCTCTTGCTCTCAGCCTCCAAACAGGAGTTGCTCACGGACAGCTTCCGGAGC | | |
| | TGCGAGCTGCTCCTGCGGGAGTGTGAGCTGCAGAGTCAGAAGCTGGGGAACAAGGTGGACAAAATC | | |
| | ATAGCTATTTTTGGTCTCGAACGGCTGGGCCTGAGGGATCTGTGGAAGCCAGGAATAGAGCTTCTC | | |
| | CAGGAGTTTTTCTCAGCACTTGAAGCAAATTACCCTGAGATCTTGAAGAGTTTAATTGTTGTGAGA | | |
| | GCCCCCAAGCTATTCGCCGTAGCCTTCAACCTGCTCAAGTCTTACATGAGTGAAGAGACACGCAGG | | |
| | AAGGTGGTGATTCTCGGAGACAACTGGAAGCAGGAGCTGACAAAATTCATCAGCCCCGACCAGCTG | | |
| | CCCGTGGAGTTTGGGGGGACCATGACTGACCCCGATGGCAACCCCAAGTGCCTGACCAAGATCAAC | | |
| | TACGGGGGTGAGGTGCCCAAGAGCTACTACCTGTGCAAGCAGGTGAGGCTGCAGTATGACCACACG | | |
| | AGGTCCGTGGGCCGCCGCTCCTCCCTGCAGGTGGAGAACGAGATCCTGTTCCCGGGCTGTGTGCTC | | |
| | AGATGTCCTGAGGTTTTACAACACCTACAGCCTGGTTCATTCTAAACGCATCAGCTACACCGTGGA | | |
| | GGTACTGCTCCCAGACCAAACCTTCATGGAGAAGATGGAGAATTCTAGAAGGCGATT | | |
| | ORF Start: ATG at 1 | | ORF Stop: TAA at 901 |
| | SEQ ID NO:46 | 300 aa | MW at 34287.3 kD |
| NOV12a, | MFRENIQDVLSALPNPDDYFLLRWLQARSFDLQKSEDMLRKHMEFRKQQDLANILAWQPPEVVRLY | | |
| CG159399-01 | | | |
| Protein Sequence | NANGICGHDGEGSPVWYHIVGSLDPKCLLLSASKQELLRDSFRSCELLLRECELQSQKLGKKVEKI | | |
| | IAIFGLEGLGLRDLWKPGIELLQEFFSALEANYPEILKSLIVVRAPKLFAVAFNLVKSYMSEETRR | | |
| | KVVILGDNWKQELTKFISPDQLPVEFGGTMTDPDGNPKCLTKINYGGEVPKSYYLCKQVRLQYEHT | | |
| | RSVGRGSSLQVENEILFPGCVLRCPEVLQHLQPGSF | | |
| | SEQ ID NO:47 | 877 bp | |
| NOV12b, | ATGTTCCGGGAGAACATCCAAGATGTGCTATCTGCGCTGCCCAATCCTGATGACTACTTCCTCCTG | | |
| CG159399-02 | | | |
| DNA Sequence | CGCTGGCTCCGAGCTCGGAGCTTTGACCTGCAAAAATCAGAGGACATGCTGAGGAAGCATATGGAG | | |
| | TTCCGCAACCAACAAGACCTGGCCAACATCCTTGCCTCGCAGCCCCCAGAGGTGGTCAGGCTGTAC | | |
| | AACGCTAACGGCATATGCGGCCACGACGGTGAGGGCAGCCCTGTCTGGTACCACATTGTGGGAAGC | | |
| | CTGGACCCCAAAGGCCTCTTGCTCTCAGCCTCCAAACAGGAGTTGCTCAGGGACAGCTTCCGGAGC | | |
| | TGCGAGCTGCTCCTGCGGGAGTGTGAGCTGCAGAGTCACAAGTTTTTCTCAGCACTTGAAGCAAAT | | |
| | TACCCTGAGATCTTGAAGAGTTTAATTCTTCTGAGAGCCCCCAAGCTATTCGCCGTAGCCTTCAAC | | |
| | CTGGACAAGTCTTACATGAGTGAAGAGACACGCAGGAAGGTGGTGATTCTCGGACACAACTGGAAG | | |
| | CAGGAGCTGACAAAATTCATCAGCCCCGACCAGCTGCCCGTGGAGTTTGGGGGGACCATGACTGAC | | |
| | CCCGATGGCAACCCCAAGTGCCTGACCAAGATCAACTACGGGGGTGAGGTGCCCAAGAGCTACTAC | | |
| | CTGTCCAAGCAGGTGAGGCTGCAGTATGAGCACACGAGGTCCGTGGGCCGCGGCTCCTCCCTGCAG | | |
| | GTGGAGAACCAGATCCTGTTCCCGGGCTGTGTGCTCAGATGTCCTGAGGTTTTACAACACCTACAG | | |
| | CCTGGTTCATTCTAAACGCATCAGCTACACCGTGGAGGTACTGCTCCCACACCAAACCTTCATGGA | | |
| | GAAGATGGAGAAATTCTAG | | |
| | ORF Start: ATG at 1 | | ORF Stop: TAA at 805 |
| | SEQ ID NO:48 | 268 aa | MW at 30756.1 kD |

| | |
|---|---|
| NOV12b, | MFRENIQDVLSALPNPDDYFLLRWLRARSFDLQKSEDMLRKHMEFRKQQDLPMILAWQPPEVVRLY |
| CG159399-02 | |
| Protein Sequence | NANGICGHDGEGSPVWYHIVGSLDPKGLLLSASKQELLRDSFRSCELLLRECELQSQKFFSALEAN |
| | YPEILKSLIVVRAPKLFAVAFNLVKSYMSEETRRKVVILGDNWKQELTKFISPDQLPVEFGGTMTD |
| | PDGNPKCLTKINYGGEVPKSYYLCKQVRLQYEHTRSVGRGSSLQVENEILFPGCVLRCPEVLQHLQ |
| | PGSF |

[0420] Sequence comparison of the above protein sequences yields the following sequence relationships shown in Table 12B.

TABLE 12B
Comparison of NOV12a against NOV12b.

| | NOV12a | Identities/ |
|---|---|---|
| | Residues/ | Similarities for |
| Protein | Match | the Matched |
| Sequence | Residues | Region |
| NOV12b | 1 . . . 300 | 267/300 (89%) |
| | 1 . . . 268 | 268/300 (89%) |

[0421] Further analysis of the NOV12a protein yielded the following properties shown in Table 12C.

TABLE 12C
Protein Sequence Properties NOV12a

| SignalP analysis: | No Known Signal Sequence Predicted | | | |
|---|---|---|---|---|
| PSORT II analysis: | PSG: a new signal peptide prediction method | | | |
| | N-region: length 8; pos. chg 1; neg. chg 2 | | | |
| | H-region: length 8; peak value 0.00 | | | |
| | PSG score: −4.40 | | | |
| | GvH: von Heijne's method for signal seq. recognition | | | |
| | GvH score (threshold: −2.1): −7.14 | | | |
| | possible cleavage site: between 29 and 30 | | | |
| | >>> Seems to have no N-terminal signal peptide | | | |
| | ALOM: Klein et al's method for TM region allocation | | | |
| | Init position for calculation: 1 | | | |
| | Tentative number of TMS(s) for the threshold 0.5: 1 | | | |
| | Number of TMS(s) for threshold 0.5: 0 | | | |
| | PERIPHERAL Likelihood = 4.93 (at 279) | | | |
| | ALOM score: −1.75 (number of TMSs: 0) | | | |
| | MITDISC: discrimination of mitochondrial targeting seq | | | |
| | R content: | 1 | Hyd Moment(75): | 15.87 |
| | Hyd Moment(95): | 13.14 | G content: | 0 |
| | D/E content: | 2 | S/T content: | 0 |

```
Score: −3.96
Gavel: prediction of cleavage sites for mitochondrial preseq
cleavage site motif not found
NUCDISC: discrimination of nuclear localization signals
pat4: none
pat7: none
bipartite: none
content of basic residues: 12.3%
NLS Score: −0.47
KDEL: ER retention motif in the C-terminus: none
ER Membrane Retention Signals:
XXRR-like motif in the N-terminus: FREN
none
SKL: peroxisomal targeting signal in the C-terminus: none
PTS2: 2nd peroxisomal targeting signal: none
VAC: possible vacuolar targeting motif: none
RNA-binding motif: none
Actinin-type actin-binding motif:
type 1: none
type 2: none
NMYR: N-myristoylation pattern: none
Prenylation motif: none
memYQRL: transport motif from cell surface to Golgi: none
Tyrosines in the tail: none
Dileucine motif in the tail: none
checking 63 PROSITE DNA binding motifs: none
checking 71 PROSITE ribosomal protein motifs: none
checking 33 PROSITE prokaryotic DNA binding motifs: none
NNCN: Reinhardt's method for Cytoplasmic/Nuclear
discrimination
Prediction: cytoplasmic
Reliability: 89
COIL: Lupas's algorithm to detect coiled-coil regions
total: 0 residues
Final Results (k = 9/23):
56.5%: cytoplasmic
17.4%: mitochondrial
13.0%: nuclear
  8.7%: peroxisomal
  4.3%: plasma membrane
>> prediction for CG159399-01 is cyt (k = 23)
```

[0422] A search of the NOV12a protein against the Geneseq database, a proprietary database that contains sequences published in patents and patent publication, yielded several homologous proteins shown in Table 12D.

TABLE 12D
Geneseq Results for NOV12a

| | | NOV12a | Identities/ | |
|---|---|---|---|---|
| | | Residues/ | Similarities for | |
| Geneseq | Protein/Organism/Length | Match | the Matched | Expect |
| Identifier | [Patent #, Date) | Residues | Region | Value |
| ABG12687 | Novel human diagnostic protein | 2 . . . 287 | 214/286 (74%) | e−128 |
| | #12678 - Homo sapiens, 502 aa. | 19 . . . 293 | 248/286 (85%) | |
| | [WO200175067-A2, 11 OCT. 2001] | | | |
| AAB43188 | Human ORFX ORF2952 polypeptide | 2 . . . 287 | 197/286 (68%) | e−122 |
| | sequence SEQ ID NO: 5904 - Homo | 19 . . . 304 | 245/286 (84%) | |
| | sapiens, 308 aa. [WO200058473-A2, | | | |
| | 05 OCT. 2000] | | | |
| AAG67024 | Rat SPF - Rattus norvegicus, 403 aa. | 2 . . . 287 | 192/286 (67%) | e−116 |
| | [WO200164740-A1, 07 SEP. 2001] | 19 . . . 304 | 232/286 (80%) | |
| ABG61931 | Prostate cancer-associated protein | 2 . . . 287 | 191/286 (66%) | e−116 |
| | #132 - Mammalia, 403 aa. | 19 . . . 304 | 233/286 (80%) | |
| | [WO200230268-A2, 18 APR. 2002] | | | |
| AAG67025 | Human SPF - Homo sapiens, 403 aa. | 2 . . . 287 | 191/286 (66%) | e−116 |
| | [WO200164740-A1, 07 SEP. 2001] | 19 . . . 304 | 233/286 (80%) | |

[0423] In a BLAST search of public sequence databases, the NOV12a protein was found to have homology to the proteins shown in the BLASTP data in Table 12E.

TABLE 12E
Public BLASTP Results for NOV12a

| | | NOV12a | Identities/ | |
|---|---|---|---|---|
| Protein | | Residues/ | Similarities for | |
| Accession | | Match | the Matched | Expect |
| Number | Protein/Organism/Length | Residues | Portion | Value |
| Q9UDX3 | WUGSC:H_DJ0539M06.4 protein - | 2 . . . 287 | 227/286 (79%) | e−138 |
| | Homo sapiens (Human), 406 aa. | 19 . . . 304 | 262/286 (91%) | |
| Q8R0F9 | Hypothetical 46.1 kDa protein - Mus | 2 . . . 287 | 201/286 (70%) | e−123 |
| | musculus (Mouse), 403 aa. | 19 . . . 304 | 245/286 (85%) | |
| Q99J08 | SEC14-like protein 2 (Alpha-tocopherol | 2 . . . 287 | 194/286 (67%) | e−115 |
| | associated protein) (TAP) - Mus | 19 . . . 304 | 231/286 (79%) | |
| | musculus (Mouse), 403 aa. | | | |
| P58875 | SEC14-like protein 2 (Alpha-tocopherol | 2 . . . 287 | 190/286 (66%) | e−115 |
| | associated protein) (TAP) (bTAP) - Bos | 19 . . . 304 | 234/286 (81%) | |
| | taurus (Bovine), 387 aa (fragment). | | | |
| Q99MS0 | SEC14-like protein 2 (Alpha-tocopherol | 2 . . . 287 | 192/286 (67%) | e−115 |
| | associated protein) (TAP) (Supernatant | 19 . . . 304 | 232/286 (80%) | |
| | protein factor) (SPF) (Squalene transfer | | | |
| | protein) - Rattus norvegicus (Rat), 403 | | | |
| | aa. | | | |

[0424] PFam analysis predicts that the NOV12a protein contains the domains shown in the Table 12F.

TABLE 12F
Domain Analysis of NOV12a

| | | Identities/ | |
|---|---|---|---|
| | NOV12a | Similarities for | |
| Pfam | Match | the Matched | Expect |
| Domain | Region | Region | Value |
| CRAL_TRIO | 44 . . . 227 | 55/197 (28%) | 7.9e−31 |
| | | 127/197 (64%) | |

### Example 13.

[0425] The NOV13 clone was analyzed, and the nucleotide and encoded polypeptide sequences are shown in Table 13A.

TABLE 13A
NOV13 Sequence Analysis

| | SEQ ID NO:49 | 2034 bp | |
|---|---|---|---|
| NOV13a, | CGGGCGGAGCGGGCATGGTGGGGTGTCGGGGGCCGCAGGCGTAGCGCTCTCGCCCTGGCCATGGAG | | |
| CG167853-01 | | | |
| DNA Sequence | CGGCCGGCGCCCGGCGAGGTGGTCATGAGCCAAGCCATCCAGCCGGCGCACGCCACTGCGCGCGGC | | |
| | GAGCTGAGCGCGGGGCAGCTGCTCAAGTGGATCGACACCACCGCCTGCCTGGCGGCTGAGAAACAT | | |
| | GCTGGAGTTTCCTGCGTTACAGCCTCAGTGGATGACATACAGTTTGAGGAGACAGCTAGAGTTGGA | | |
| | CAAGTTATAACCATCAAAGCAAAAGTTACTAGAGCATTCAGCACAAGCATGGAGATCAGTATCAAG | | |
| | GTCATGGTACAGGATATGCTCACTGGCATTGAGAAGCTTGTTAGTGTGGCTTTCTCCACATTTGTA | | |
| | GCCAAACCAGTTGGAAAAGAAAAGATTCATTTAAAACCAGTCACACTTCTAACTGAACAAGATCAT | | |
| | GTGGAACATAATCTGGCTGCTGAGAGAAGGAAAGTTCGATTACAACATGAAGATACCTTTAACAAT | | |
| | TTAATGAAGGAAAGTAGCAAATTTGATGATCTCATTTTTGATGAAGAGGAAGCAGCGGTTTCCACA | | |
| | AGGGGCACCTCCGTTCAGAGCATTGAACTGGTCCTCCCACCCCATGCAAACCATCACGGAAATACA | | |
| | TTTGGTGGCCAGATTATGGCGTGGATGGAGACAGTGGCTACTATTTCTGCAAGCCGCCTGTGTTGG | | |
| | GCTCATCCCTTTCTGAAGTCCGTAGATATGTTTAGTTCCGGGGAACCATCTACAGTTGGAGATCGT | | |
| | CTTGTCTTCACTGCCATTGTCAACAATACATTTCAGACCTGTGTTGAAGTTAAAGTTCGCGTGGAG | | |
| | GCCTTTGACTGTCAGGAATGGGCCGAGGGCCGACGGCGTCACATCAACAGTGCTTTTCTCATTTAC | | |
| | AATTCTGCTGATGATAAGGAAAATCTCATCACGTTTCCCAGAATCCAACCCATTTCAAAGGATGAT | | |
| | TTCAGACGCTATCGGGGAGCTATTGCACGCAAGCGAATTCGCCTAGGCAGAAAATATGTTATTTCC | | |
| | CACAAAGAAGAGGTTCCACTTTGCATACACTGGGATATCAGCAAGCAGGCATCCCTGAGTGACAGC | | |
| | AATGTGGAGGCCCTCAAAAAACTGGCAGCCAAAAGGGGTTGGGAGGTTACCAGCACTGTGGAAAAG | | |
| | ATAAAAATATATACTCTGGAAGAGCATGATGTTTTATCTGTTTCGGTTGAAAAGCACGTGGGAAGT | | |
| | CCAGCACATTTGGCTTATCGTCTCTTGTCTGACTTTACAAAGCGACCTTTGTGGGACCCCCATTTT | | |
| | GTGTCCTGTGAAGTCATAGACTGGGTGAGTGAAGATGATCAGCTGTATCACATCACCTGTCCTATA | | |
| | CTGAATGATGACAAACCCAAAGACTTGGTAGTACTCGTATCACGAAGAAAACCCCTCAAAGATGGT | | |
| | AACACTTACACAGTGGCAGTGAAGTCGGTCATTTTGCCATCGGTCCCCCCGTCTCCACAGTACATC | | |
| | AGAAGTGAAATCATATGTGCCGGATTTCTCATCCATGCTATTGACAGCAATTCATGCATCGTATCT | | |
| | TACTTTAACCATATGTCTGCTAGCATCCTTCCTTACTTTGCTGGAAATCTTGGTGGCTGGTCAAAA | | |
| | TCCATTGAAGAAACAGCAGCCTCTTGTATACAGTTCTTAGAGAATCCTCCTGATGATGGGTTTGTA | | |
| | AGCACATTTTAAAGGTCAACTTTCAATTACTGGTAATTTAATTTCCCACTTTTAATTCCAAGCACC | | |
| | CTTAGCCCTGACATCTGTCAAGCTTTGGGGCCACAAAATAATTTAATATAACCCTAAGCAAAATGC | | |
| | AGTGACGGAGTTAAAAAACAAAATQCATCTTAAGTCAAATACCAGTGATTTGGATTAGCATTAAAA | | |
| | GAGCTTTAGAATTCTGTTGTAAGTCATCTGTGGCTCTGCCTCTTCCAGGGGCACAGATAGTGGAAA | | |
| | ATTGCCTGTATGCAATACTATGTGTTCTATAAAATGGCATGAATTTAGTTTAAA | | |
| | OFF Start: ATG at 61 | | ORF Stop: TAA at 1726 |
| | SEQ ID NO:50 | 555 aa | MW at 62049.3 kD |

| | |
|---|---|
| NOV13a, | MERPAPGEVVMSQAIOPAHATARGELSAGQLLKWIDTTACLAAEKHAGVSCVTASVDDIQFEETAR |
| CG167853-01 | |
| Protein Sequence | VGQVITIKAKVTRAFSTSMEISIKVMVQDMLTGIEKLVSVAFSTFVAKPVGKEKIHLKPVTLLTEQ |
| | DHVEHNLAAERRKVRLQHEDTFNNLMKESSKFDDLIFDEEEGAVSTRGTSVQSIELVLPPHANHHG |
| | NTFGGQIMAWMETVATISASRLCWAHPFLKSVDMFKFRGPSTVGDRLVFTAIVNNTFQTCVEVGVR |
| | VEAFDCQEWAEGRGRHINSAFLIYNSADDKENLITFPRIQPTSKDDFRRYRGAIARKRIRLGRKYV |
| | ISHKEEVPLCIHWDISKQASLSDSNVEALKKLAAKRGWEVTSTVEKIKIYTLEEHDVLSVWVEKHV |
| | GSPAHLAYRLLSDFTKRPLWDPHFVSCEVIDWVSEODQLYHITCPILNDDKPKDLVVLVSRRKPLK |
| | DGNTYTVAVKSVILPSVPPSPQYIRSEIICAGFLIHAIDSNSCIVSYFNHMSASILPYFAGNLGGW |
| | SKSIEETAASCIQFLENPPDDGFVSTF |

[0426] Further analysis of the NOV13a protein yielded the following properties shown in Table 13B.

TABLE 13B
Protein Sequence Properties NOV13a

| SignalP analysis: | No Known Signal Sequence Predicted | | | |
|---|---|---|---|---|
| PSORT II analysis: | PSG: a new signal peptide prediction method | | | |
| | N-region: length 8; pos. chg 1; neg. chg 2 | | | |
| | H-region: length 14; peak value 0.00 | | | |
| | PSG score: −4.40 | | | |
| | GvH: von Heijne's method for signal seq. recognition | | | |
| | GvH score (threshold: −2.1): −5.41 | | | |
| | possible cleavage site: between 20 and 21 | | | |
| | >>> Seems to have no N-terminal signal peptide | | | |
| | ALOM: Klein et al's method for TM region allocation | | | |
| | Init position for calculation: 1 | | | |
| | Tentative number of TMS(s) for the threshold 0.5: 0 | | | |
| | number of TMS(s) . . . fixed | | | |
| | PERIPHERAL Likelihood = 0.74 (at 490) | | | |
| | ALOM score: 0.74 (number of TMSs: 0) | | | |
| | MITDISC: discrimination of mitochondrial targeting seq | | | |
| | R content: | 1 | Hyd Moment(75): | 13.80 |
| | Hyd Moment(95): | 6.39 | G content: | 1 |
| | D/E content: | 2 | S/T content: | 0 |

```
Score: −5.51
Gavel: prediction of cleavage sites for mitochondrial preseq
cleavage site motif not found
NUCDISC: discrimination of nuclear localization signals
pat4: RRKP (4) at 457
pat7: none
bipartite: RRYRGAIARKRIRLGRK at 312
content of basic residues: 11.2%
NLS Score: 0.27
KDEL: ER retention motif in the C-terminus: none
ER Membrane Retention Signals:
XXRR-like motif in the N-terminus: ERPA
none
SKL: peroxisomal targeting signal in the C-terminus: none
PTS2: 2nd peroxisomal targeting signal: none
VAC: possible vacuolar targeting motif: none
RNA-binding motif: none
Actinin-type actin-binding motif:
type 1: none
type 2: none
NMYR: N-myristoylation pattern: none
Prenylation motif: none
memYQRL: transport motif from cell surface to Golgi: none
Tyrosines in the tail: none
Dileucine motif in the tail: none
checking 63 PROSITE DNA binding motifs: none
checking 71 PROSITE ribosomal protein motifs: none
checking 33 PROSITE prokaryotic DNA binding motifs: none
NNCN: Reinhardt's method for Cytoplasmic/Nuclear
discrimination
Prediction: cytoplasmic
Reliability: 94.1
COIL: Lupas's algorithm to detect coiled-coil regions
total: 0 residues
Final Results (k = 9/23):
60.9% cytoplasmic
13.0% mitochondrial
13.0% nuclear
  8.7% peroxisomal
  4.3%: plasma membrane
>> prediction for CG167853-01 is cyt (k = 23)
```

[0427] A search of the NOV13 a protein against the Geneseq database, a proprietary database that contains sequences published in patents and patent publication, yielded several homologous proteins shown in Table 13C.

TABLE 13C
Geneseq Results for NOV13a

| | | | Identities/ | |
|---|---|---|---|---|
| | | | Similarities for | |
| Geneseq | Protein/Organism/Length | NOV13a Residues/ | the Matched | Expect |
| Identifier | [Patent #, Date] | Match Residues | Region | Value |
| AAB95601 | Human protein sequence SEQ ID | 6 . . . 549 | 274/548 (50%) | e−142 |
| | NO: 18290 - Homo sapiens, 594 aa. | 44 . . . 586 | 362/548 (66%) | |
| | [EP1074617-A2, 07 FEB. 2001] | | | |
| AAU18380 | Human endocrine polypeptide SEQ | 325 . . . 549 | 94/227 (41%) | 3e−44 |
| | ID No 335 - Homo sapiens, 246 aa. | 12 . . . 238 | 136/227 (59%) | |
| | [WO200155364-A2, 02 AUG. 2001] | | | |
| AAU20561 | Human secreted protein, Seq ID No | 325 . . . 497 | 78/175 (44%) | 3e−37 |
| | 553 - Homo sapiens, 207 aa. | 12 . . . 186 | 113/175 (64%) | |
| | [WO200155326-A2, 02 AUG. 2001] | | | |
| AAU18487 | Human endocrine polypeptide SEQ | 325 . . . 497 | 78/175 (44%) | 3e−37 |
| | ID No 442 - Homo sapiens, 207 aa. | 12 . . . 186 | 113/175 (64%) | |
| | [WO200155364-A2, 02 AUG. 2001] | | | |
| ABG06274 | Novel human diagnostic | 166 . . . 217 | 51/52 (98%) | 2e−22 |
| | protein #6265 - Homo sapiens, 404 aa. | 344 . . . 395 | 52/52 (99%) | |
| | [WO200175067-A2, 11 OCT. 2001] | | | |

[0428] In a BLAST search of public sequence databases, the NOV13a protein was found to have homology to the proteins shown in the BLASTP data in Table 13D.

TABLE 13D
Public BLASTP Results for NOV13a

| | | | Identities/ | |
|---|---|---|---|---|
| Protein | | | Similarities for | |
| Accession | | NOV13a Residues/ | the Matched | Expect |
| Number | Protein/Organism/Length | Match Residues | Portion | Value |
| Q8WYK0 | Cytoplasmic acetyl-CoA hydrolase 1 | 1 . . . 555 | 554/555 (99%) | 0.0 |
| | (EC 3.1.2.1) (CACH-1) (hCACH-1) - | 1 . . . 555 | 555/555 (99%) | |
| | Homo sapiens (Human), 555 aa. | | | |
| Q9DBK0 | Cytoplasmic acetyl-CoA hydrolase 1 | 5 . . . 553 | 449/549 (81%) | 0.0 |
| | (EC 3.1.2.1) (CACH-1) (mCACH-1) - | 6 . . . 554 | 500/549 (90%) | |
| | Mus musculus (Mouse), 556 aa. | | | |
| Q8R108 | RIKEN cDNA 1300004O04 gene - | 13 . . . 553 | 442/541 (81%) | 0.0 |
| | Mus musculus (Mouse), 543 aa | 1 . . . 541 | 492/541 (90%) | |
| | (fragment). | | | |
| Q99NB7 | Cytoplasmic acetyl-CoA hydrolase 1 | 5 . . . 553 | 434/549 (79%) | 0.0 |
| | (EC 3.1.2.1) (CACH-1) (rACH) - | 6 . . . 554 | 491/549 (89%) | |
| | Rattus norvegicus (Rat), 556 aa. | | | |
| Q8VHQ9 | Brown fat inducible thioesterase (EC | 6 . . . 549 | 268/546 (49%) | e−137 |
| | 3.1.2.-) (BFIT) (Adipose associated | 46 . . . 586 | 353/546 (64%) | |
| | thioesterase) - Mus musculus (Mouse), | | | |
| | 594 aa. | | | |

[0429] PFam analysis predicts that the NOV13a protein contains the domains shown in the Table 13E.

TABLE 13E
Domain Analysis of NOV13a

| | | Identities/ | |
|---|---|---|---|
| | NOV13a | Similarities for | |
| Pfam | Match | the Matched | Expect |
| Domain | Region | Region | Value |
| Acyl- | 1 . . . 122 | 35/147 (24%) | 4.8e−11 |
| CoA_{—} | | 89/147 (61%) | |
| hydro | | | |
| Acyl- | 165 . . . 304 | 35/147 (24%) | 4.1e−09 |
| CoA_{—} | | 86/147 (59%) | |
| hydro | | | |
| START | 348 . . . 549 | 40/250 (16%) | 0.3 |
| | | 122/250 (49%) | |

### Example 14.

[0430] The NOV14 clone was analyzed, and the nucleotide and encoded polypeptide sequences are shown in Table 14A.

TABLE 14A
NOV14 Sequence Analysis

| | SEQ ID NO:51 | 1583 bp | |
|---|---|---|---|
| NOV14a, | GGCTGAGAGCGCGCCATGGGGCAGGCCGGCTGCAAGGGGCTCTGCCTGTCGCTGTTCGACTACAAG | | |
| CG167873-01 | | | |
| DNA Sequence | ACCGAGAAGTATGTCATCGCCAAGAACAACAAGGTGCGCCTGCTGTACCGGCTGCTGCAGGCCTCC | | |
| | ATCCTGGCGTACCTGGTCGTATGGGTGTTCCTGATAAAGAAGGGTTACCAAGACGTCGACACCTCC | | |
| | CTGCAGAGTGCTGTCATCACCAAAGTCAAGGGCGTGGCCTTCACCAACACCTCGGATCTTGGGCAG | | |
| | CGGATCTGGGATGTCGCCGACTACGTCATTCCAGCCCAGGGAGAGAACGTCTTTTTTGTGGTCACC | | |
| | AACCTGATTGTGACCCCCAACCAGCGGCAGAACGTCTGTGCTGAGAATGAAGCCATTCCTGATGGC | | |
| | GCGTGCTCCAAGGACAGCGACTGCCACGCTCGGGAAGCGGTTACAGCTGGAAACGGAGTGAAGACC | | |
| | CGCCGCTGCCTGCGGAGAGAGAACTTCGCCAGGGGCACCTGTGAGATCTTTGCCTGGTGCCCGTTG | | |
| | GAGACAAGCTCCAGGCCCGAGGAGCCATTCCTGAAGGAGGCCGAAGACTTCACCATTTTCATAAAG | | |
| | AACCACATCCGTTTCCCCAAATTCAACTTCTCCAACCGTCTCGACAATAAACTTTCAAAGTCTGTC | | |
| | TCCTCCGGGTACAACTTCAGATTTGCCAGATATTACCGAGACGCAGCCGGGGTGGAGTTCCGCACC | | |
| | CTGATGAAAGCCTACGGGATCCGCTTTGACGTGATGGTGAACGGCAAGGGTGCTTTCTTCTGCGAC | | |
| | CTGGTACTCATCTACCTCATCAAAAAGAGAGAGTTTTACCGTGACAAGAAGTACGAGGAAGTGAGG | | |
| | GGCCTAGAAGACAGTTCCCAGGAGGCCGAGGACGAGGCATCGGGGCTGGGGCTATCTGAGCAGCTC | | |
| | ACATCTGGGCCAGGGCTGCTGGGGATGCCGGAGCAGCAGGAGCTGCAGGAGCCACCCGAGGCGAAG | | |
| | CGTGGAAGCAGCAGTCAGAAGGGGAACGGATCTGTGTGCCCACAGCTCCTGGAGCCCCACAGGAGC | | |
| | ACGTGAATTGCCTCTGCTTACGTTCAGGCCCTGTCCTAAACCCAGCCGTCTAGCACCCAGTGATCC | | |
| | CATGCCTTTGGGAATCCCAGGATGCTGCCCAACGCGAAATTTGTACATTGGGTGCTATCAATGCCA | | |
| | CATCACAGGGACCAGCCATCACAGAGCAAACTGACCTCCACGTCTGATGCTCGGGTCATCAGGACG | | |
| | GACCCATCATGGCTGTCTTTTTGCCCCACCCCCTGCCGTCAGTTCTTCCTTTCTCCGTGGCTGGCT | | |
| | TCCCGCACTAGGGAACGGGTTGTAAATGGGGAACATGACTTCCTTCCGGAGTCCTTGAGCACCTCA | | |
| | GCTAAGGACCGCAGTGCCCTCTAGAGTTCCTAGATTACCTCACTGGGAATAGCATTGTGCGTGTCC | | |
| | GGAAAAGGGCTCCATTTGGTTCCAGCCCACTCCCCTCTGCAAGTCCCACAGCTTCCCTCAGAGCAT | | |
| | ACTCTCCAGTGGATCCAAGTACTCTCTCTCCTAAAGACACCACCTTCCTGCCAGCTGTTTGCCCT | | |
| | ORF Start: ATG at 16 | | ORF Stop: TGA at 1060 |
| | SEQ ID NO:52 | 348 aa | MW at 38876.9 kD |
| NOV14a, | MGQACCKGLCLSLFDYKTEKYVIAKNKKVGLLYRLLQASILAYLVVWVFLIKKGYQDVDTSLQSAV | | |
| CG167873-01 | | | |
| Protein Sequence | ITKVKGVAFThTSDLGQRIWDVADYVIPAQGENVFFVVTNLIVTPNQRQNVCAENEGIPDGACSKD | | |
| | SDCHAGEAVTAGNOVKTGRCLRRENLARGTCEIFAWCPLETSSRPEEPFLKEAEDFTIFIKNHIRF | | |
| | PKFNFSNRLDNKLSKSVSSGYNFRFARYYRDAAGVEFRTLMKAYGIRFDVMVNGKGAFFCDLVLIY | | |
| | LIKKREFYRDKKYEEVRGLEDSSQEAEDEASGLCLSEQLTSGPGLLGMPEQQELQEPPEAKRGSSS | | |
| | QKGNGSVCPQLLEPHRST | | |
| | SEQ ID NO:53 | 1616 bp | |
| NOV14b, | GGCACGAGGGTCCGCAAGCCCGGCTGAGAGCGCGCCATGCGGCAGGCGGGCTGCAAGGGGCTCTGC | | |
| CG167873-02 | | | |
| DNA Sequence | CTGTCGCTGTTCGACTACAAGACCGAGAAGTATGTCATCGCCAAGAACAAGAAGGTGGGCCTGCTG | | |
| | TACCGGCTGCTGCAGGCCTCCATCCTGGCGTACCTGGTCGTATGGGTGTTCCTGATAAAGAAGGGT | | |
| | TACCAAGACGTCGACACCTCCCTGCAGAGTGCTGTCATCACCAAAGTCAAGGGCCTGGCCTTCACC | | |
| | AACACCTCGGATCTTGGGCAGCGGATCTGGGATGTCGCCGACTACGTCATTCCAGCCCAGGGAGAG | | |
| | AACGTCTTTTTTGTGGTCACCAACCTGATTGTGACCCCCAACCAGCGGCAGAACGTCTGTGCTGAG | | |
| | AATGAAGGCATTCCTGATCGCGCGTGCTCCAAGGACAGCGACTGCCACGCTGGGGAAGCGGTTACA | | |
| | GCTGGAAACGGAGTGAAGACCGGCCGCTGCCTGCGGAGACGGAACTTGGCCAGGGGCACCTGTGAG | | |
| | ATCTTTGCCTGGTGCCCGTTGGAGACAAGCTCCAGGCCGGAGGAGCCATTCCTGAAGGAGGCCGAA | | |
| | GACTTCACCATTTTCATAAAGAACCACATCCGTTTCCCCAAATTCAACTTCTCCAACAATCTGATG | | |
| | GACGTCAACGACAGATCTTTCCTGAAATCATGCCACTTTGGCCCCAAGAACCACTACTGCCCCATC | | |
| | TTCCGACTGGGCTCCGTGATCCGCTGGGCCGGGAGCGACTTCCAGGATATAGCCCTGGAGATTTGC | | |
| | CAGATATTACCGAGACGCAGCCGGGGTGGAGTTCCGCACCCTGATGAAAGCCTACGGGATCCGCTT | | |
| | TGACGTGATGGTGAACGGCAAGGCAGGGAAGTTCAGCATCATTCCCACCATCATCAACGTGGGCTC | | |
| | TGCGGTGGCGCTCATGGGTGCTGGTGCTTTCTTCTGCGACCTGGTACTCATCTACCTCATCAAAAA | | |
| | GAGAGAGTTTTACCGTGACAAGAAGTACGAGGAAGTGAGGGGCCTAGAAGACAGTTCCCAGGAGGC | | |
| | CGAGGACGAGGCATCGGGGCTGGGGCTATCTGAGCAGCTCACATCTGGGCCAGGGCTGCTGGGGAT | | |
| | GCCGGAGCAGCAGGAGCTGCAGGAGCCACCCGAGGCGAAGCGTGGAAGCAGCAGTCAGAAGGGGAA | | |
| | CGGATCTGTGTGCCCACAGCTCCTGGAGCCCCACAGGAGCACGTGAATTGCCTCTGCTTACGTTCA | | |
| | GGCCCTGTCCTAAACCCAGCCGTCTAGCACCCAGTGATCCCATGCCTTTGGGAATCCCAGGATGCT | | |
| | GCCCAACGGGAAATTTGTACATTGGGTGCTATCAATGCCACATCACAGGGACCAGCCATCACAGAG | | |
| | CAAAGTGACCTCCACGTCTGATGCTGGGGTCATCAGGACGGACCCATCATGGCTGTCTTTTTGCCC | | |
| | CACCCCCTGCCGTCAGTTCTTCCTTTCTCCGTGGCTGGCTTCCCGCACTAGGGAACGGGTTGTAAA | | |
| | TGGGGAACATGACTTCCTTCCGGAGTCCTTGAGCACCTCAGCTAAGGACCGCAGTGCCCTGTAGAG | | |
| | TTCCTAGATTACCTCACTGGGAATAGCATTGT | | |
| | ORF Start: ATG at 37 | | ORF Stop: TGA at 859 |
| | SEQ ID NO:54 | 274 aa | MW at 30600.8 kD |

| | |
|---|---|
| NOV14b, | MGQAGCKGLCLSLFDYKTEKYVIAKNKKVGLLYRLLQASILAYLVVWVFLIKKGYQDVDTSLQSAV |
| CG167873-02 | |
| Protein Sequence | ITKVKGVAFTNTSDLGQRIWDVADYVIPAQGENVFFVVTNLIVTPNQRQNVCAENEGIPDGACSKD |
| | SDCHAGEAVTAGNGVKTGRCLRRGNLARGTCEIFAWCPLETSSRPEEPFLKEAEDFTIFIKNHIRF |
| | PKFNFSNWVMDVKDRSFLKSCHFGPKNHYCPIFRLGSVIRWAGSDFQDIALEICQILPRRSRGGVP |
| | HPDESLRDPL |

[0431] Sequence comparison of the above protein sequences yields the following sequence relationships shown in Table 14B.

TABLE 14B
Comparison of NOV14a against NOV14b.

| | | Identities/ |
|---|---|---|
| | | Similarities for |
| Protein | NOV14a Residues/ | the Matched |
| Sequence | Match Residues | Region |
| NOV14b | 1 . . . 227 | 207/227 (91%) |
| | 1 . . . 227 | 212/227 (93%) |

[0432] Further analysis of the NOV14a protein yielded the following properties shown in Table 14C.

TABLE 14C
Protein Sequence Properties NOV14a

| SignalP analysis: | Cleavage site between residues 57 and 58 | | | |
|---|---|---|---|---|
| PSORT II analysis: | PSG: a new signal peptide prediction method | | | |
| | N-region: length 7; pos. chg 1; neg. chg 0 | | | |
| | H-region: length 7; peak value 3.40 | | | |
| | PSG score: −1.00 | | | |
| | GvH: von Heijne's method for signal seq. recognition | | | |
| | GvH score (threshold: −2.1): −6.29 | | | |
| | possible cleavage site: between 41 and 42 | | | |
| | >>> Seems to have no N-terminal signal peptide | | | |
| | ALOM: Klein et al's method for TM region allocation | | | |
| | Init position for calculation: 1 | | | |
| | Tentative number of TMS(s) for the threshold 0.5: 1 | | | |
| | Number of TMS(s) for threshold 0.5: 1 | | | |
| | INTEGRAL | Likelihood = | −7.22 | Transmembrane 35-51 |
| | PERIPHERAL | Likelihood = | 0.63 (at 250) | |
| | ALOM score: −7.22 (number of TMSs: 1) | | | |
| | MTOP: Prediction of membrane topology (Hartmann et al.) | | | |
| | Center position for calculation: 42 | | | |
| | Charge difference: −5.0 C(0.0)-N(5.0) | | | |
| | N >= C: N-terminal side will be inside | | | |
| | >>> membrane topology: type 2 (cytoplasmic tail 1 to 35) | | | |
| | MITDISC: discrimination of mitochondrial targeting seq | | | |
| | R content: | 0 | Hyd Moment(75): | 7.02 |
| | Hyd Moment (95): | 8.95 | G content: | 3 |
| | D/E content: | 2 | S/T content: | 2 |

```
Score: −7.41
Gavel: prediction of cleavage sites for mitochondrial preseq
cleavage site motif not found
NUCDISC: discrimination of nuclear localization signals
pat4: none
pat7: none
bipartite: none
content of basic residues: 12.9%
NLS Score: −0.47
KDEL: ER retention motif in the C-terminus: none
ER Membrane Retention Signals: none
SKL: peroxisomal targeting signal in the C-terminus: none
PTS2: 2nd peroxisomal targeting signal: none
VAC: possible vacuolar targeting motif: none
RNA-binding motif: none
Actinin-type actin-binding motif:
type1: none
type2: none
NMYR: N-myristoylation pattern: MGQAGCK
Prenylation motif: none
memYQRL: transport motif from cell surface to Golgi: none
Tyrosines in the tail: 15, 20, 32
Dileucine motif in the tail: found LL at 31
checking 63 PROSITE DNA binding motifs: none
checking 71 PROSITE ribosomal protein motifs: none
checking 33 PROSITE prokaryotic DNA binding motifs: none
NNCN: Reinhardt's method for Cytoplasmic/Nuclear
discrimination
Prediction: cytoplasmic
Reliability: 89
COIL: Lupas's algorithm to detect coiled-coil regions
total: 0 residues
Final Results (k = 9/23):
34.8%: cytoplasmic
26.1%: mitochondrial
17.4%: Golgi
  8.7%: endoplasmic reticulum
  4.3%: extracellular, including cell wall
  4.3%: nuclear
  4.3%: vesicles of secretory system
>> prediction for CG167873-01 is cyt (k = 23)
```

[0433] A search of the NOV14a protein against the Geneseq database, a proprietary database that contains sequences published in patents and patent publication, yielded several homologous proteins shown in Table 14D.

TABLE 14D
Geneseq Results for NOV14a

| | | | Identities/ | |
|---|---|---|---|---|
| | | | Similarities for | |
| Geneseq | Protein/Organism/Length | NOV14a Residues/ | the Matched | Expect |
| Identifier | [Patent #, Date] | Match Residues | Region | Value |
| ABB97440 | Novel human protein SEQ ID NO: | 1 . . . 348 | 255/422 (60%) | e−120 |
| | 708 - Homo sapiens, 422 aa. | 1 . . . 422 | 270/422 (63%) | |
| | [WO200222660-A2, 21 MAR. 2002] | | | |
| AAW76439 | Human p53 regulated protein, P2X5 - | 1 . . . 210 | 159/214 (74%) | 1e−91 |
| | Homo sapiens, 455 aa. | 1 . . . 214 | 181/214 (84%) | |
| | [WO9842835-A1, 01 OCT. 1998] | | | |
| AAE01141 | Human purinergic receptor P2X6 | 13 . . . 204 | 102/192 (53%) | 3e−54 |
| | protein - Homo sapiens, 441 aa. | 22 . . . 212 | 131/192 (68%) | |
| | [US6214581-B1, 10 APR. 2001] | | | |
| AAB84382 | Amino acid sequence of a human | 6 . . . 206 | 110/204 (53%) | 3e−54 |
| | purinoreceptor P2X4 - Homo sapiens, | 5 . . . 203 | 141/204 (68%) | |
| | 388 aa. [US6242216-B1, | | | |
| | 05 JUN. 2001] | | | |
| AAW55035 | HPURR amino acid sequence - Homo | 6 . . . 206 | 110/204 (53%) | 3e−54 |
| | sapiens, 388 aa. [WO9818916-A1, | 5 . . . 203 | 141/204 (68%) | |
| | 07 MAY 1998] | | | |

[0434] In a BLAST search of public sequence databases, the NOV14a protein was found to have homology to the proteins shown in the BLASTP data in Table 14E.

TABLE 14E
Public BLASTP Results for NOV14a

| | | | Identities/ | |
|---|---|---|---|---|
| Protein | | | Similarities for | |
| Accession | | NOV14a Residues/ | the Matched | Expect |
| Number | Protein/Organism/Length | Match Residues | Portion | Value |
| Q93086 | P2X purinoceptor 5 (ATP receptor) | 1 . . . 348 | 264/421 (62%) | e−126 |
| | (P2X5) (Purinergic receptor) - Homo | 1 . . . 421 | 280/421 (65%) | |
| | sapiens (Human), 421 aa. | | | |
| AAH39015 | Similar to purinergic receptor P2X, | 1 . . . 348 | 263/422 (62%) | e−125 |
| | ligand-gated ion channel, 5 - Homo | 1 . . . 422 | 278/422 (65%) | |
| | sapiens (Human), 422 aa. | | | |
| CAD34956 | Sequence 264 from Patent | 1 . . . 348 | 255/422 (60%) | e−119 |
| | WO0222660 - Homo sapiens | 1 . . . 422 | 270/422 (63%) | |
| | (Human), 422 aa. | | | |
| Q91VE2 | ATP-gated ionotropic P2X5 receptor | 1 . . . 204 | 157/204 (76%) | 3e−92 |
| | subunit (P2X purinoceptor) (ATP | 1 . . . 204 | 181/204 (87%) | |
| | receptor) (Purinergic receptor) - Mus | | | |
| | musculus (Mouse), 455 aa. | | | |
| S71344 | purinergic receptor P2X5 - rat, 455 aa. | 1 . . . 210 | 160/214 (74%) | 5e−92 |
| | | 1 . . . 214 | 182/214 (84%) | |

[0435] PFam analysis predicts that the NOV14a protein contains the domains shown in the Table 14F.

TABLE 14F
Domain Analysis of NOV14a

| | | Identities/ | |
|---|---|---|---|
| | NOV14a | Similarities for | |
| Pfam | Match | the Matched | Expect |
| Domain | Region | Region | Value |
| P2X_{—} | 14 . . . 204 | 139/208 (67%) | 8.8e−150 |
| receptor | | 190/208 (91%) | |
| P2X_{—} | 205 . . . 292 | 62/112 (55%) | 5e−52 |
| receptor | | 87/112 (78%) | |

### Example 15.

[0436] The NOV15 clone was analyzed, and the nucleotide and encoded polypeptide sequences are shown in Table 15A.

TABLE 15A
NOV15 Sequence Analysis

| | SEQ ID NO:55 | 1596 bp | |
|---|---|---|---|
| NOV15a, | GGGGAACCCCAGGCCGCCGGCGCCCGGACCATGTCGTCTCCGGGGCCGTCGCAGCCGCCGGCCGAG | | |
| CG167893-01 | | | |
| DNA Sequence | GACCCGCCCTGGCCCGCCCGCCTCCTGCGTGCGCCTCTGGCGCTGCTGCGGCTCGACCCCAGCGGG | | |
| | GGCGCGCTGCTGCTATGCGGCCTCGTAGCGCTGCTGGGCTGGAGCTGGCTGCGGAGCCGCCGGGCG | | |
| | CGGGGCATCCCGCCCGGGCCCACGCCCTGGCCTCTGGTGGGCAACTTCGGTCACGTGCTGCTGCCT | | |
| | CCCTTCCTCCGGCGGCGGAGCTGGCTGAGCAGCAGGACCAGGGCCGCAGGGATTGATCCCTCGGTC | | |
| | ATAGGCCCGCAGGTGCTCCTGGCTCACCTAGCCCGCGTGTACGGCAGCATCTTCAGCTTCTTTATC | | |
| | GGCCACTACCTGGTCGTGGTCCTCAGCGACTTCCACAGCGTGCGCGAGGCGCTGGTGCAGCAGGCC | | |
| | GACGTCTTCAGCGACCGCCCGCGGGTGCCGCTCATCTCCATCGTGACCAAGGAGAAGGGTGTTGTG | | |
| | TTTGCACATTATGGTCCCGTCTGGAGACAACAAAGGAAGTTCTCTCATTCAACTCTTCGTCATTTT | | |
| | GGGTTGGGAAAACTTAGCTTGGAGCCCAAGATTATTGAGGAGTTCAAATATGTGAAAGCAGAAATG | | |
| | CAAAAGCACGGAGAAGACCCCTTCTGCCCTTTCTCCATCATCAGCAATGCCGTCTCTAACATCATT | | |
| | TGCTCCTTGTGCTTTGGCCAGCGCTTTGATTACACTAATAGTGAGTTCAAGAAAATGCTTGGTTTT | | |
| | ATGTCACGAGGCCTAGAAATCTGTCTGAACAGTCAAGTCCTCCTGGTCAACATATGCCCTTGGCTT | | |
| | TATTACCTTCCCTTTGGACCATTTAAGGAATTAAGACAAATTGAAAAGGATATAACCAGTTTCCTT | | |
| | AAAAAAATCATCAAAGACCATCAAGAGTCTCTGGATAGAGAGAACCCTCAGGACTTCATAGACATG | | |
| | TACCTTCTCCACATGGAAGAGGAGAGGAAAAATAATAGTAACAGCAGTTTTGATGAAGAGTACTTA | | |
| | TTTTATATCATTGGGGATCTCTTTATTGCTGGGACTGATACCACAACTAACTCTTTGCTCTGGTGC | | |
| | CTGCTGTATATGTCGCTGAACCCCGATGTACAAGAAAAGGTTCATGAAGAAATTGAAAGAGTCATT | | |
| | GGCGCCAACCGAGCTCCTTCCCTCACAGACAAGGCCCAGATGCCCTACACAGAAGCCACCATCATG | | |
| | GAAGTGCAGAGGCTAACTGTGGTGGTGCCGCTTGCCATTCCTCATATGACCTCAGAGAACACAGTG | | |
| | CTCCAAGGGTATACCATTCCTAAACGCACATTGATCTTACCCAACCTGTGGTCAGTACATAGAGAC | | |
| | CCAGCCATTTGGGAGAAACCGGAGGATTTCTACCCTAATCGATTTCTGGATGACCAAGGACAACTA | | |
| | ATTAAAAAAGAAACCTTTATTCCTTTTGGGATAGGTCAGTTAGCCTTTACATTTTACATATATATG | | |
| | TGTGTGTGTGTGTGTGTGTGTGTATGTGTGTGTGTGTGTGTGTGTGTGTGTGTATAGTTGAATGAA | | |
| | TGCGTGAATAAA | | |
| | ORF Start: ATG at 31 | | ORF Stop: TAG at 1573 |
| | SEQ ID NO:56 | 514 aa | MW at 58488.5 kD |

| | |
|---|---|
| NOV15a, | MSSPGPSQPPAEDPPWPARLLRAPLGLLRLDPSGGALLLCGLVALLGWSWLRRRRARGIPPGPTPW |
| CG167893-01 | |
| Protein Sequence | PLVGNFGHVLLPPFLRRRSWLSSRTRAAGIDPSVIGPQVLLAHLARVYGSIFSFFIGHYLVVVLSD |
| | FHSVREALVQQAEVFSDRPRVPLISIVTKEKGVVFAHYGPVWRQQRKFSHSTLRHFGLGKLSLEPK |
| | IIEEFKYVKAEMQKHCEDPFCPFSIISNAVSNIICSLCFGQRFDYTNSEFKKMLGFMSRGLEICLN |
| | SQVLLVNICPWLYYLPFGPFKELRQIEKDITSFLKKIIKDHQESLDRENPQDFIDMYLLHMEEERK |
| | NNSNSSFDEEYLFYIIGDLFIAGTDTTTNSLLWCLLYMSLNPDVQEKVHEEIERVIGANRAPSLTD |
| | KAQMPYTEATIMEVQRLTVVVPLAIPHMTSENTVLQGYTIPKGTLILPNLWSVHRDPAIWEKPEDF |
| | YPNRFLDDQGQLIKKETFIPFGIGQLAFTFYIYMCVCVCVCVCVCVCVCVCV |

[0437] Further analysis of the NOV15a protein yielded the following properties shown in Table 15B.

TABLE 15B
Protein Sequence Properties NOVl5a

| SignalP analysis: | Cleavage site between residues 59 and 60 | | | | |
|---|---|---|---|---|---|
| PSORT II analysis: | PSG: a new signal peptide prediction method | | | | |
| | N-region: length 0; pos. chg 0; neg. chg 0 | | | | |
| | H-region: length 11; peak value 0.89 | | | | |
| | PSG score: −3.51 | | | | |
| | GvH: von Heijne's method for signal seq. recognition | | | | |
| | GvH score (threshold: −2.1): −0.09 | | | | |
| | possible cleavage site: between 51 and 52 | | | | |
| | >>> Seems to have no N-terminal signal peptide | | | | |
| | ALOM: Klein et al's method for TM region allocation | | | | |
| | Init position for calculation: 1 | | | | |
| | Tentative number of TMS(s) for the threshold 0.5: 4 | | | | |
| | INTEGRAL | Likelihood = | −3.29 | Transmembrane | 35-51 |
| | INTEGRAL | Likelihood = | −1.86 | Transmembrane | 117-133 |
| | INTEGRAL | Likelihood = | −0.69 | Transmembrane | 221-237 |
| | INTEGRAL | Likelihood = | −16.40 | Transmembrane | 498-514 |
| | PERIPHERAL | Likelihood = | 1.32 (at 405) | | |
| | ALOM score: −16.40 (number of TMSs: 4) | | | | |
| | MTOP: Prediction of membrane topology (Hartmann et al.) | | | | |
| | Center position for calculation: 42 | | | | |
| | Charge difference: 3.0 C(5.0)-N(2.0) | | | | |
| | C > N: C-terminal side will be inside | | | | |
| | >>> membrane topology: type 3b | | | | |
| | MITDISC: discrimination of mitochondrial targeting seq | | | | |
| | R content: | 0 | Hyd Moment (75): | 3.90 | |
| | Hyd Moment (95): | 2.10 | G content: | 1 | |
| | D/E content: | 2 | S/T content: | 3 | |

Score: −7.39
Gavel: prediction of cleavage sites for mitochondrial preseq
cleavage site motif not found
NUCDISC: discrimination of nuclear localization signals
pat4: RRRR (5) at 52
pat7: PPFLRRR (3) at 78
pat7: PFLRRRS (4) at 79
bipartite: none
content of basic residues: 10.1%
NLS Score: 0.44
KDEL: ER retention motif in the C-terminus: none
ER Membrane Retention Signals: none
SKL: peroxisomal targeting signal in the C-terminus: none
PTS2: 2nd peroxisomal targeting signal: none
VAC: possible vacuolar targeting motif: found
ILPN at 442
RNA-binding motif: none
Actinin-type actin-binding motif:
type 1: none
type 2: none
NMYR: N-myristoylation pattern: none
Prenylation motif; none
memYQRL: transport motif from cell surface to Golgi: none
Tyrosines in the tail: none
Dileucine motif in the tail: none
checking 63 PROSITE DMA binding motifs: none
checking 71 PROSITE ribosomal protein motifs: none
checking 33 PROSITE prokaryotic DNA binding motifs: none
NNCN: Reinhardt's method for Cytoplasmic/Nuclear
discrimination
Prediction: cytoplasmic
Reliability: 94.1
COIL: Lupas's algorithm to detect coiled-coil regions
total: 0 residues
Final Results (k = 9/23):
33.3%: vacuolar
33.3%: endoplasmic reticulum
11.1%: mitochondrial
11.1%: Golgi
11.1%: cytoplasmic
>> prediction for CG167893-01 is vac (k = 9)

[0438] A search of the NOV15a protein against the Geneseq database, a proprietary database that contains sequences published in patents and patent publication, yielded several homologous proteins shown in Table 15C.

TABLE 15C
Geneseq Results for NOV15a

| | | | Identities/ | |
|---|---|---|---|---|
| | | | Similarities for | |
| Geneseq | Protein/Organism/Length | NOV15a Residues/ | the Matched | Expect |
| Identifier | [Patent #, Date] | Match Residues | Region | Value |
| AAU91320 | Human P450TEC protein - Homo | 1 . . . 487 | 486/487 (99%) | 0.0 |
| | sapiens, 544 aa. [WO200181585-A2, | 1 . . . 487 | 487/487 (99%) | |
| | 01 NOV. 2001] | | | |
| AAE21061 | Human drug metabolising enzyme | 1 . . . 487 | 486/487 (99%) | 0.0 |
| | (DME-19) protein - Homo sapiens, | 1 . . . 487 | 487/487 (99%) | |
| | 544 aa. [WO200212467-A2, | | | |
| | 14 FEB. 2002] | | | |
| ABB55770 | Human polypeptide SEQ ID NO 146 - | 164 . . . 487 | 323/324 (99%) | 0.0 |
| | Homo sapiens, 398 aa. | 18 . . . 341 | 324/324 (99%) | |
| | [US2001039335-A1, 08 NOV. 2001] | | | |
| AAU39061 | Human secreted protein yb44_1 - | 164 . . . 487 | 323/324 (99%) | 0.0 |
| | Homo sapiens, 398 aa. | 18 . . . 341 | 324/324 (99%) | |
| | [WO200175068-A2, 11 OCT. 2001] | | | |
| AAY29335 | Human secreted protein clone yb44_1 | 164 . . . 487 | 323/324 (99%) | 0.0 |
| | protein sequence - Homo sapiens, 398 | 18 . . . 341 | 324/324 (99%) | |
| | aa. [WO9937674-A1, 29 JUL. 1999] | | | |

[0439] In a BLAST search of public sequence databases, the NOV15a protein was found to have homology to the proteins shown in the BLASTP data in Table 15D.

TABLE 15D
Public BLASTP Results for NOV15a

| | | NOV15a | Identities/ | |
|---|---|---|---|---|
| Protein | | Residues/ | Similarities | |
| Accession | | Match | for the | Expect |
| Number | Protein/Organism/Length | Residues | Matched Portion | Value |
| CAD12288 | Sequence 16 from Patent | 1 . . . 487 | 486/487 (99%) | 0.0 |
| | WO0181585 - Homo sapiens | 1 . . . 487 | 487/487 (99%) | |
| | (Human), 544 aa. | | | |
| Q9CX98 | 8430436A10Rik protein - Mus | 1 . . . 512 | 392/512 (76%) | 0.0 |
| | musculus (Mouse), 501 aa. | 1 . . . 497 | 436/512 (84%) | |
| Q96EQ6 | Similar to RIKEN cDNA | 1 . . . 163 | 163/163 (100%) | 1e-91 |
| | 8430436A10 gene - Homo sapiens | 1 . . . 163 | 163/163 (100%) | |
| | (Human), 168 aa. | | | |
| Q8JHT9 | Cytochrome P450 - Brachydanio | 25 . . . 486 | 179/464 (38%) | 5e-87 |
| | rerio (Zebrafish) | 3 . . . 436 | 271/464 (57%) | |
| | (Danio rerio), 498 aa. | | | |
| Q9PVI0 | Cytochrome P450 2N1 - Fundulus | 36 . . . 487 | 182/454 (40%) | 2e-85 |
| | heteroclitus (Killifish) | 14 . . . 441 | 263/454 (57%) | |
| | (Mummichog), 497 aa. | | | |

[0440] PFam analysis predicts that the NOV15a protein contains the domains shown in the Table 15E.

TABLE 15E
Domain Analysis of NOV15a

| | | Identities/ | |
|---|---|---|---|
| | | Similarities | |
| Pfam | NOV15a Match | for the | Expect |
| Domain | Region | Matched Region | Value |
| p450 | 60 . . . 72 | 9/13 (69%) | 0.21 |
| | | 13/13 (100%) | |
| p450 | 107 . . . 486 | 150/413 (36%) | 6.4e-132 |
| | | 302/413 (73%) | |

### Example 16.

[0441] The NOV16 clone was analyzed, and the nucleotide and encoded polypeptide sequences are shown in Table 16A.

TABLE 16A
NOV16 Sequence Analysis

| | SEQ ID NO:57 | 3853 bp | |
|---|---|---|---|
| NOV16a, | CGCCTGTCCCTAGCTGTGGCTGAGCCAAGATTGCACTTGTGAGAAGGCCTGACACGCAGCATGGGC | | |
| CG169088-01 | | | |
| DNA Sequence | CACATGGCCAATAGTTCCATCGAGTTCCACCCCAAGCCCCAGCAGCAGCGGGATGTCCCCCAGGCT | | |
| | GGAGGCTTTGGGTGCACGCTGGCGGAGCTGCGCACCCTCATGGAGCTGCGAGCGGCCGAGGCGCTG | | |
| | CAGAAGATCGAGGACGCCTACGGGGATGTCAGCGGGCTCTGCCGGAGGCTGAAGACCTCACCCACA | | |
| | GAGGGCCTGCCGGACAACACCAATGACCTGGAGAAGCGCAGGCAGATCTACGGGCAGAACTTCATC | | |
| | CCCCCAAAGCAACCCAAGACCTTCCTGCAGCTGGTGTGGGAGGCCCTGCAGGACGTGACCCTCATC | | |
| | ATCCTGGAGGTGGCTGCCATCGTCTCTCTGGGCCTCTCGTTCTATGCGCCGCCAGGAGAGGAGAGT | | |
| | GAAGCCTGTGGGAATGTGTCGCGAGGCGCAGAAGATGAGGGCGAGGCCGAAGCTGGCTGGATCGAG | | |
| | GGGGCTGCCATCCTGCTGTCCGTCATCTGTGTGGTGCTGGTCACGGCCTTCAATGACTGGAGCAAG | | |
| | GAGAAGCAGTTCCGAGGCCTGCAGAGCCGAATTGAGCAGGAGCAGAAGTTCACGGTCATCCGGAAC | | |
| | GGGCAGCTCCTCCAGGTCCCCGTGGCTGCGCTGGTGGTGGGGGACATTGCCCAGGTCAAGTACGGC | | |
| | GACCTGCTGCCAGCCGACGGCGTGCTCATCCAGGCCAATGACCTCAAGATCCACGAGAGCTCCCTG | | |
| | ACGGGCGAGTCTGACCACGTGCGCAAGTCAGCTGACAAAGATCCCATGCTGCTCTCAGGCACTCAT | | |
| | GTCATCGAAGGTTCTGGAAGAATGGTGGTGACCGCCGTTGGCGTGAATTCCCAGACAGGCATCATC | | |
| | TTCACGCTGCTTGGAGCTGGCGGAGAGGAGGAAGAGAAGAAAGATAAGAAAGGCAAGCAGCAGGAT | | |
| | GGGGCCATGCAGAGTAGCCAGACCAAAGCTAAGAAGCAGGATGGTGCAGTGGCCATGGAGATGCAG | | |
| | CCCCTGAAGAGCGCGGAGGGTGGGGAGATGGAGGAGCGGGAGAAGAAGAAAGCCAACGCACCCAAA | | |
| | AAGGAGAAGTCTGTCCTTCAGGGGAAGCTCACAAAGCTAGCCGTGCAGATCGGGAAAGCAGGGCTG | | |
| | GTGATGTCTGCCATCACCGTCATCATCCTGGTCCTCTACTTTGTGATTGAGACGTTTGTCGTGGAA | | |
| | GGCCGGACATGGCTGGCAGAGTGCACGCCGGTCTATGTACAATACTTCGTGAAGTTCTTCATCATT | | |
| | GGTGTCACTGTGCTGGTCGTGGCTGTCCCAGAGGGCCTGCCTCTTGCTGTCACCATCTCCTTAGCT | | |
| | TACTCTGTCAAGAAAATGATGAAAGACAACAACCTGGTGCGCCACCTGGATGCCTGCGAGACCATG | | |
| | GGCAACGCCACAGCCATCTGCTCCGACAAGACGGGCACGCTCACCACCAACCGTATGACCGTGGTC | | |
| | CAGTCCTACCTAGGGGACACCCACTACAAAGAGATTCCGGCCCCCAGCGCCCTGACCCCTAAGATC | | |
| | CTCGACCTCCTGGTCCATGCCATCTCCATCAACAGTGCCTATACCACCAAAATACTACCTCCTGAG | | |
| | AAGGAAGGCGCCCTCCCACGCCAGGTGGGCAATAAGACGGAGTGCGCCCTGCTGGGCTTCGTCTTG | | |
| | GACCTGAAGCGGGACTTCCAGCCCGTGCGCGAGCAGATCCCGGAAGACAAGCTTTACAAAGTGTAC | | |
| | ACCTTCAACTCGGTCCGCAAGTCCATGAGCACAGTCATCCGCATGCCCGACGGTGGCTTCCGCCTC | | |
| | TTCAGCAAGGGGGCCTCACAGATCCTCTTGAAAAAGTGCACCAACATCTTGAACAGCAATGGCGAA | | |
| | CTCCGGGGCTTTCGGCCTCGGGACCGGGACGACATGGTCAGGAAGATCATCGAGCCGATGGCTTGC | | |
| | GATGGCCTCCGCACCATCTGCATCGCCTACCGGGACTTCTCTGCAGGCCAGGAGCCCGACTCGGAC | | |
| | AACGAGAATGAGGTCGTGGGTGACCTCACCTGCATAGCTGTCGTGGGCATTGAGGACCCTGTGCGG | | |
| | CCCGAGGTCCCTGAACCTATCCGAAAATGCCAGCGTGCTGGCATCACAGTCCGCATGGTGACTGGG | | |
| | GACAACATCAACACGGCCCGGGCCATCGCAGCCAAATGCGGCATCATCCAGCCCGGGGACGACTTC | | |
| | CTGTGCCTAGAAGGGAAGGAGTTCAACCGGCGGATCCGCAATGAGAAAGGCGAGATAGAACACGAG | | |
| | CGGCTGGACAAGGTGTGGCCCAAGCTGAGGGTGCTGGCCCGGTCGTCTCCCACCGACAAGCACACA | | |
| | CTGGTCAAAGGGATTATCGACAGCACCACTGGTGAGCAGCGGCAGGTGGTCGCTGTGACAGGGGAT | | |
| | GGCACCAACGATGGGCCGGCCCTCAAGAAGGCGGACGTGGGCTTCGCCATGGGCATCGCAGGGACC | | |
| | GACGTGGCCAAGGAGGCCTCCGACATCATCCTGACCGATGACAACTTCACCAGCATCGTCAAGGCA | | |
| | GTCATGTGGGGCCGTAACGTCTATGACAGCATCTCCAAGTTCCTGCAGTTTCAACTGACCGTCAAT | | |
| | GTGGTGGCTGTGATCGTGGCCTTCACAGGTGCCTGCATTACTCAGGACTCTCCTCTCAAAGCCGTG | | |
| | CAGATGTTGTGGGTGAACTTCATCATGGACACATTTGCCTCTCTGGCCCTGGCGACGGAGCCACCC | | |
| | ACAGAGTCGCTGCTGCTGCGGAAGCCGTACGGCCGCGACAAGCCCCTCATCTCCCGCACCATGATG | | |
| | AAGAACATTCTGGGCCACGCCGTGTACCAGCTCGCCATCATCTTCACCCTGCTGTTTGTCGGGGAG | | |
| | CTCTTCTTCGACATCGACAGCGGGAGGAATGCGCCCCTGCACTCGCCACCCTCAGAGCACTACACC | | |
| | ATCATCTTCAACACGTTCGTCATGATGCAGCTCTTTAACGAGATCAACGCCCGCAAGATCCACGGC | | |
| | GAGAGGAACGTGTTCGACGGCATCTTCAGCAACCCCATCTTCTGCACCATCGTTTTGGGCACTTTC | | |
| | GGGATTCAGATTGTCATCCTCCAGTTTCGCGGGAAGCCCTTCAGCTGCTCCCCACTATCCACAGAA | | |
| | CAGTGGCTCTGGTGCCTGTTTGTTGGTGTTCGGGAGCTGGTCTGGGGACAGGTCATTGCCACCATC | | |
| | CCCACCAGCCAGCTCAAGTGCCTGAAGGAAGCCGGGCACGGGCCCGGGAAGGACGAGATGACCGAC | | |
| | GAGGAGCTGGCCGAAGGCGAGGAAGAGATCGACCATGCCGAGCGGGAGCTCCGCAGGGGCCAGATC | | |
| | CTCTGGTTCCGGGCCCTGAACCCGATTCAGACGCAGATGGAGGTAGTGAGTACCTTCAAGAGAAGC | | |
| | GGTTCAGTTCACGGTGCTGTGCGCCGGCGGTCTTCGGTCCTCAGCCAGCTTCATGACGTAACCAAT | | |
| | CTTTCTACCCCTACTCACATCCGGGTGGTGAAAGCGTTCCGTACCTCGCTCTATGAAGGCCTGGAG | | |
| | AAACCAGAATCCAAGACCTCCATTCACAACTTCATGGCCACGCCCGAGTTTCTGATCAATGACTAC | | |
| | ACCCACAACATCCCGCTCATTCACGACACGGACGTGGACGAGAACGAGGAGCGCCTCCGGGCCCCC | | |
| | CCGCCCCCGTCCCCCAACCAGAACAACAACGCCATAGACAGCGGCATCTACCTGACCACGCATGTC | | |
| | ACCAAGTCAGCTACCTCTTCAGTGTTTTCCTCCAGTCCCGGGAGCCCGCTCCACAGCGTGGAGACG | | |
| | TCCCTCTAACAAGAACTTGTCTCAG | | |
| | ORF Start: ATG at 61 | | ORF Stop: TAA at 3835 |
| | SEQ ID NO:58 | 1258 aa | MW at 138346.3 kD |

| | |
|---|---|
| NOV16a, | MGDMANSSIEFHPKPQQQRDVPQAGGFGCTLAELRTLMELRGAEALQKIEEAYGDVSGLCRRLKTS |
| CG169088-01 | |
| Protein Sequence | PTEGLADNTNDLEKRRQIYGQNFIPPKQPKTFLQLVWEALQDVTLIILEVAAIVSLGLSFYAPPCE |
| | ESEACGNVSGGAEDEGEAEAGWIEGAAILLSVICVVLVTAFNDWSKEKQFRGLQSRIEQEQKFTVI |
| | RNGQLLQVPVAALVVGDIAQVKYGDLLPADGVLIQANDLKIDESSLTGESDHVRKSADKDPMLLSG |
| | THVMEGSGRMVVTAVGVNSQTGIIFTLLGAGGEEEEKKDKKGKQQDGAMESSQTKAKKQDGAVANE |
| | MQPLKSAEGGEMEEREKKKANAPKKEKSVLQGKLTKLAVQIGKAGLVMSAITVIILVLYFVIETFV |
| | VEGRTWLAECTPVYVQYFVKFFIIGVTVLVVAVPEGLPLAVTISLAYSVKKMMKDNNLVRHLDACE |
| | TMGNATAICSDKTGTLTTNRMTVVQSYLGDTHYKEIPAPSALTPKILDLLVHAISINSAYTTKILP |
| | PEKEGALPRQVGNKTECALLGFVLDLKRDFQPVREQIPEDKLYKVYTFNSVRKSMSTVIRMPDGGF |
| | RLFSKGASEILLKKCTNILNSNGELRGFRPRDRDDMVRKIIEPMACDGLRTICIAYRDFSAGQEPD |
| | WDNENEVVGDLTCIAVVGIEDPVRPEVPEAIRKCQRAGITVRMVTGDNINTARAIAAKCGIIQPGE |
| | DFLCLEGKEFNRRIRNEKGEIEQERLDKVWPKLRVLARSSPTDKHTLVKGIIDSTTGEQRQVVAVT |
| | GDGTNDGPALKKADVGFAMGIAGTDVAKEASDIILTDDNFTSIVKAVMWGRNVYDSISKFLQFQLT |
| | VNVVAVIVAFTGACITQDSPLKAVQMLWVNLIMDTEASLALATEPPTESLLLRKPYGRDKPLISRT |
| | MMKNILGHAVYQLAIIFTLLFVGELFFDIDSGRNAPLHSPPSEHYTIIFNTFVMMQLFUEINARKI |
| | HGERNVFDGIFSNPIFCTIVLGTFGIQIVIVQFGGKPFSCSPLSTEQWLWCLFVGVGELVWGQVIA |
| | TIPTSQLKCLKEAGHGPGKDEMTDEELAEGEEEIDHAERELRRCQILWFRGLNRIQTQMEVVSTFK |
| | RSGSVQGAVRRRSSVLSQLHDVTNLSTPTHIRVVKAFRSSLYEGLEKPESKTSIHNFMATPEFLIM |
| | DYTHNIPLIDDTDVDENEERLRAPPPPSPNQNNNAIDSGIYLTTHVTKSATSSVFSSSPGSPLHSV |
| | ETSL |

[0442] Further analysis of the NOV16a protein yielded the following properties shown in Table 16B.

TABLE 16B
Protein Sequence Properties NOV16a

| SignalP | No Known Signal Sequence Predicted | | | | |
|---|---|---|---|---|---|
| analysis: | | | | | |
| PSORT II | PSG: a new signal peptide prediction method | | | | |
| analysis: | N-region: length 10; pos. chg 0; neg. chg 2 | | | | |
| | H-region: length 3; peak value 0.00 | | | | |
| | PSG score: −4.40 | | | | |
| | GvH: von Heijne's method for signal seq. recognition | | | | |
| | GvH score (threshold: −2.1): −5.70 | | | | |
| | possible cleavage site: between 45 and 46 | | | | |
| | >>> Seems to have no N-terminal signal peptide | | | | |
| | ALOM: Klein et al's method for TM region allocation | | | | |
| | Init position for calculation: 1 | | | | |
| | Tentative number of TMS(s) for the threshold 0.5: 10 | | | | |
| | INTEGRAL | Likelihood = | −6.26 | Transmembrane | 109-125 |
| | INTEGRAL | Likelihood = | −10.14 | Transmembrane | 157-173 |
| | INTEGRAL | Likelihood = | −1.54 | Transmembrane | 203-219 |
| | INTEGRAL | Likelihood = | −12.21 | Transmembrane | 376-392 |
| | INTEGRAL | Likelihood = | −7.96 | Transmembrane | 413-429 |
| | INTEGRAL | Likelihood = | −6.53 | Transmembrane | 857-873 |
| | | | | | 900 |
| | INTEGRAL | Likelihood = | −5.79 | Transmembrane | 937-953 |
| | INTEGRAL | Likelihood = | −7.64 | Transmembrane | 1005-1021 |
| | INTEGRAL | Likelihood = | −0.69 | Transmembrane | 1042-1058 |
| | PERIPHERAL | Likelihood = | 1.27 | (at 667) | |

| ALOM score: −12.21 (number of TMSs: 10) | | | |
|---|---|---|---|
| MTOP: Prediction of membrane topology (Hartmann et al.) | | | |
| Center position for calculation: 116 | | | |
| Charge difference: −2.0 C(−5.0)-N(−3.0) | | | |
| N >= C: N-terminal side will be inside | | | |
| >>> membrane topology: type 3a | | | |
| MITDISC: discrimination of mitochondrial targeting seq | | | |
| R content: | 0 | Hyd Moment (75): | 4.84 |
| Hyd Moment (95): | 9.11 | G content: | 1 |
| D/E content: | 2 | S/T content: | 2 |

| Score: −6.74 | |
|---|---|
| Gavel: prediction of cleavage sites for mitochondrial preseq | |
| cleavage site motif not found | |
| NUCDISC: discrimination of nuclear localization signals | |
| pat4: none | |
| pat7: PKKEKSV (5) at 353 | |
| bipartite: none | |
| content of basic residues: 10.9% | |
| NLS Score: −0.04 | |
| KDEL: ER retention motif in the C-terminus: none | |
| ER Membrane Retention Signals: none | |
| SKL: peroxisomal targeting signal in the C-terminus: none | |
| PTS2: 2nd peroxisomal targeting signal: none | |
| VAC: possible vacuolar targeting motif: none | |
| RNA-binding motif: none | |
| Actinin-type actin-binding motif: | |
| type 1: none | |
| type 2: none | |
| NMYR: N-myristoylation pattern: none | |
| Prenylation motif: none | |
| memYQRL: transport motif from cell surface to Golgi: none | |
| Tyrosines in the tail: none | |
| Dileucine motif in the tail: none | |
| checking 63 PROSITE DNA binding motifs: none | |
| checking 71 PROSITE ribosomal protein motifs: none | |
| checking 33 PROSITE prokaryotic DNA binding motifs: none | |
| NNCN: Reinhardt's method for Cytoplasmic/Nuclear discrimination | |
| Prediction: cytoplasmic | |
| Reliability: 94.1 | |
| COIL: Lupas's algorithm to detect coiled-coil regions | |
| 1073 G | 0.84 |
| 1074 K | 0.85 |
| 1075 D | 0.85 |
| 1076 E | 0.89 |
| 1077 M | 0.89 |
| 1078 T | 0.89 |
| 1079 D | 0.89 |
| 1080 E | 0.89 |
| 1081 E | 0.89 |
| 1082 L | 0.89 |
| 1083 A | 0.89 |
| 1084 E | 0.89 |
| 1085 G | 0.89 |
| 1086 E | 0.89 |
| 1087 E | 0.89 |
| 1088 E | 0.89 |
| 1089 I | 0.89 |
| 1090 D | 0.89 |
| 1091 H | 0.89 |
| 1092 A | 0.89 |
| 1093 E | 0.89 |
| 1094 R | 0.89 |
| 1095 E | 0.89 |
| 1096 L | 0.89 |
| 1097 R | 0.89 |
| 1098 R | 0.89 |
| 1099 G | 0.89 |
| 1100 Q | 0.89 |
| 1101 I | 0.89 |
| 1102 L | 0.89 |
| 1103 W | 0.89 |

total: 31 residues
Final Results (k = 9/23):
77.8%: endoplasmic reticulum
22.2%: mitochondrial
>> prediction for CG169088-01 is end (k = 9)

[0443] A search of the NOV16a protein against the Geneseq database, a proprietary database that contains sequences published in patents and patent publication, yielded several homologous proteins shown in Table 16C.

TABLE 16C
Geneseq Results for NOV16a

| | | NOV16a | Identities/ | |
|---|---|---|---|---|
| | | Residues/ | Similarities | |
| Geneseq | Protein/Organism/Length | Match | for the | Expect |
| Identifier | [Patent #, Date] | Residues | Matched Region | Value |
| ABG27317 | Novel human diagnostic protein | 1 . . . 1258 | 1018/1290 (78%) | 0.0 |
| | #27308 - Homo sapiens, 1255 aa. | 13 . . . 1255 | 1108/1290 (84%) | |
| | [WO200175067-A2, 11 OCT. 2001] | | | |
| ABG27322 | Novel human diagnostic protein | 1 . . . 1258 | 1008/1259 (80%) | 0.0 |
| | #27313 - Homo sapiens, 1210 aa. | 13 . . . 1210 | 1093/1259 (86%) | |
| | [WO200175067-A2, 11 OCT. 2001] | | | |
| ABB58837 | Drosophila melanogaster | 27 . . . 1063 | 678/1052 (64%) | 0.0 |
| | polypeptide SEQ ID NO 3303 - | 11 . . . 994 | 791/1052 (74%) | |
| | Drosophila melanogaster, 999 aa. | | | |
| | [WO200171042-A2, 27 SEP. 2001] | | | |
| ABP41721 | Human ovarian antigen HSYEC21, | 572 . . . 1258 | 532/689 (77%) | 0.0 |
| | SEQ ID NO: 2853 - Homo sapiens, | 8 . . . 654 | 592/689 (85%) | |
| | 654 aa. [WO200200677-A1, | | | |
| | 03 JAN. 2002] | | | |
| AAG49832 | Arabidopsis thaliana protein | 25 . . . 1046 | 391/1034 (37%) | e-166 |
| | fragment SEQ ID NO: 63081 - | 106 . . . 1030 | 564/1034 (53%) | |
| | Arabidopsis thaliana, 1066 aa. | | | |
| | [EP1033405-A2, 06 SEP. 2000] | | | |

[0444] In a BLAST search of public sequence databases, the NOV16a protein was found to have homology to the proteins shown in the BLASTP data in Table 16D.

TABLE 16D
Public BLASTP Results for NOV16a

| | | NOV16a | Identities/ | |
|---|---|---|---|---|
| Protein | | Residues/ | Similarities | |
| Accession | | Match | for the | Expect |
| Number | Protein/Organism/Length | Residues | Matched Portion | Value |
| Q64568 | Plasma membrane calcium- | 1 . . . 1258 | 1236/1258 (98%) | 0.0 |
| | transporting ATPase 3 (EC | 1 . . . 1258 | 1245/1258 (98%) | |
| | 3.6.3.8) (PMCA3) (Plasma | | | |
| | membrane calcium pump | | | |
| | isoform 3) (Plasma | | | |
| | membrane calcium ATPase | | | |
| | isoform 3) - Rattus | | | |
| | norvegicus (Rat), 1258 aa. | | | |
| Q16720 | Plasma membrane calcium- | 1 . . . 1258 | 1216/1258 (96%) | 0.0 |
| | transporting ATPase 3 (EC | 1 . . . 1220 | 1218/1258 (96%) | |
| | 3.6.3.8) (PMCA3) (Plasma | | | |
| | membrane calcium pump | | | |
| | isoform 3) (Plasma | | | |
| | membrane calcium ATPase | | | |
| | isoform 3) - Homo sapiens | | | |
| | (Human), 1220 aa. | | | |
| A34308 | Ca2 + transporting ATPase | 1 . . . 1158 | 1124/1158 (97%) | 0.0 |
| | (EC 3.6.1.38), plasma | 1 . . . 1144 | 1133/1158 (97%) | |
| | membrane isoform 3a - rat, | | | |
| | 1159 aa. | | | |
| P11505 | Plasma membrane calcium- | 1 . . . 1258 | 1015/1265 (80%) | 0.0 |
| | transporting ATPase 1 (EC | 1 . . . 1258 | 1129/1265 (89%) | |
| | 3.6.3.8) (PMCA1) (Plasma | | | |
| | membrane calcium pump | | | |
| | isoform 1) (Plasma | | | |
| | membrane calcium ATPase | | | |
| | isoform 1) - Rattus | | | |
| | norvegicus (Rat), 1258 aa. | | | |
| P20020 | Plasma membrane calcium- | 1 . . . 1258 | 1009/1265 (79%) | 0.0 |
| | transporting ATPase 1 (EC | 1 . . . 1258 | 1128/1265 (88%) | |
| | 3.6.3.8) (PMCA1) (Plasma | | | |
| | membrane calcium pump | | | |
| | isoform 1) (Plasma | | | |
| | membrane calcium ATPase | | | |
| | isoform 1) - Homo sapiens | | | |
| | (Human), 1258 aa. | | | |

[0445] PFam analysis predicts that the NOV16a protein contains the domains shown in the Table 16E.

TABLE 16E
Domain Analysis of NOV16a

| | | Identities/ | |
|---|---|---|---|
| | | Similarities | |
| | NOV16a Match | for the | Expect |
| Pfam Domain | Region | Matched Region | Value |
| Cation_ATPase_N | 44 . . . 123 | 22/89 (25%) | 0.0001 |
| | | 57/89 (64%) | |
| E1-E2_ATPase | 196 . . . 284 | 41/99 (41%) | 2.4e−29 |
| | | 74/99 (75%) | |
| E1-E2_ATPase | 355 . . . 463 | 37/110 (34%) | 9.8e−19 |
| | | 81/110 (74%) | |
| Hydrolase | 467 . . . 815 | 45/366 (12%) | 1.6e−12 |
| | | 234/366 (64%) | |
| Cation_ATPase_C | 911 . . . 1067 | 40/204 (20%) | 3.5e−20 |
| | | 124/204 (61%) | |

### Example 17.

[0446] The NOV17 clone was analyzed, and the nucleotide and encoded polypeptide sequences are shown in Table 17A.

TABLE 17K
NOV17 Sequence Analysis

| | SEQ ID NO:59 | 4092 bp | |
|---|---|---|---|
| NOV17a, | GGGCGGTGGTGCCGCGTCGGGGAAGAGCGCATCCCGCGGGGTCCCGAGCCCGGCGCTGGCGGAGAG | | |
| CG169201-01 | | | |
| DNA Sequence | ACGGGGGCGCCCCCTCCCCACAGGAGGAGCCTCGCGCTCCTCCGCCATCCTTCCCCCGCGCGGCGG | | |
| | GCTCGCCTTCTCAGTGGGTGCTGCGCGAGCTGCCGGCCCGGGGTGCCGGGGCCAGATAAGGGCGAT | | |
| | CCGCGGGGCCGCCGCCCCCGGGTCAGGCAGGCCGGGGGCGGGCCGCGAGTGAGGCGGCGCCGCCGC | | |
| | TAGGCTGCGGGCGGCTGGGGGCCGGGGGAGCGCGGAGAGCCGAGGGGGGCAGGCGGCGAGCGGGTG | | |
| | GCCCGGCCGCCCGCCTCGCTGCTCCGCTTGGCGCCGCCGGCCCACGCCGCAGTGTGTTTTGTGGAC | | |
| | GGCGCCTTCCCAGACAGCCCGGTAGAGCCCAGCTCAGCGCCCGGCAGCCTTCGACGCGATGTTCCG | | |
| | CCGGAGCTTGAATCGTTTTTGTGCTGGAGAAGAGAAACGAGTTGGCACACGCACAGTGTTTGTTGG | | |
| | CAATCATCCAGTTTCGGAAACAGAAGCTTACATTGCACAAAGATTTTGTGATAATAGAATAGTCTC | | |
| | ATCTAAGTATACACTTTGGIAATTTTCTCCCAAAGAATCTGTTTGAACAGTTTAGAAGAATTGCAAA | | |
| | TTTTTATTTTCTCATAATCTTCCTTGTACAGGTCACAGTAGACACACCAACTAGCCCAGTTACCAG | | |
| | TGGACTTCCACTTTTCTTTGTTATAACTGTTACAGCCATCAAGCAGGGATATGAGGATTGGCTGAG | | |
| | ACACAGAGCTGACAATGAAGTCAACAAAACCACTGTTTACATTATTGAAAATGCAAAGCGAGTGAG | | |
| | AAAAGAAAGTGAAAAAATCAAGGTTGGTGATGTAGTAGAAGTACAGGCAGATGAAACCTTTCCCTG | | |
| | TGATCTTATTCTTCTATCATCTTGCACCACTGATGGAACCTGTTATGTCACTACAGCCAGTCTTGA | | |
| | TGGGGAATCCAATTGCAAGACACATTATGCAGTACGTGATACCATTGCACTGTGTACAGCAGAATC | | |
| | CATCGATACCCTCCGAGCAGCAATTGAATGTGAACAGCCTCAACCTCACCTCTACAAATTTGTTGG | | |
| | GCGAATCAATATCTACAGTAATAGTCTTGAGGCTGTTGCCAGGTCTTTGGGACCTGAAAATCTCTT | | |
| | GCTGAAAGGAGCTACGCTAAAAAATACCGAGAAGATATATGGAGTTGCTGTTTACACTGGAATGGA | | |
| | AACCAAAATGGCTTTGAACTACCAAGGGAAATCTCAGAAACGTTCTGCTGTTGAAAAATCTATTAA | | |
| | TGCTTTCCTGATTGTATATTTATTTATCTTACTGACCAAAGCTGCAGTATGCACTACTCTAAAGTA | | |
| | TGTTTGGCAAAGTACCCCATACAATGATGAACCTTGGTATAACCAAAAGACTCAGAAAGAGCGAGA | | |
| | GACCTTGAAGGTTTTAAAAATGTTCACCGACTTCCTATCATTTATGGTTCTATTCAACTTTATCAT | | |
| | TCCTGTCTCCATGTACGTCACAGTAGAAATGCAGAAATTCTTGGGCTCCTTCTTCATCTCATGGGA | | |
| | TAAGGACTTTTATGATGAACAAATTAATGAAGGAGCCCTGGTTAACACATCAGACCTTAATGAAGA | | |
| | ACTTGGTCAGGTGGATTATGTATTTACACATAAGACTGGAACACTCACTGAAAACAGCATCGAATT | | |
| | CATTGAATGCTGCATAGATGGCCACAAATATAAAGGTGTAACTCAAGAGGTTGATGGATTATCTCA | | |
| | AACTGATCGAACTTTAACATATTTTGACAAAGTAGATAAGAATCGAGAAGAGCTGTTTCTACGTGC | | |
| | CTTGTGTTTATGTCATACTGTAGAAATCAAAACAAACGATGCTGTTGATGGAGCTACAGAATCAGC | | |
| | TGAATTAACCTATATCTCCTCTTCACCAGATGAAATAGCTTTGGTGAAAGGAGCTAAAAGGTACGG | | |
| | GTTCACATTTTTAGGAAATCGAAATGGATATATGAGAGTAGAGAGCCAAAGAAAAGAAATAGAAGA | | |
| | ATATGAACTTCTTCAAACCTTAACTTTGATGCTGTCCGGCGACAGTATGAGTGTAATTGTGAAGAC | | |
| | TCAAGAAGGAGACATACTTCTCTTTTGTAAAGGAGCAGACTCCGCAGTTTTTCCCAGAGTGCAAAA | | |
| | TCATGAAATTGAGTTAACTAAAGTCCATGTGGAACGTAATGCAATGGATGGGTATCGGACACTCTG | | |
| | TGTAGCCTTCAAAGAAATTGCTCCAGATGATTATGAAAGAATTAACAGACAGCTCATAGAGGCAAA | | |
| | AATGGCCTTACAAGACAGAGAAGAAAAATCGAAAAAGTTTTCGATGATATTGAGACAAAACATGAA | | |
| | TTTAATTGGAGCCACTGCAGTTGAAGACAAGCTACAAGATCAAGCTGCAGAGACCATTGAAGCTCT | | |
| | GCATGCAGCAGGCCTGAAAAGTCTGGGTGCTCACTGGGGACAAGATGGAGACAGCTAATCCACATG | | |
| | CTATGCCTGCCGCCTTTTCCAGACCAACACTGAGCTCTTAGAACTAACCACAAAAACCATTGAAGA | | |
| | AAGTGAAAGGAAAGAAGATCGATTACATGAATTATTGATAGAATATCGCAAGAAATTGCTGAATGA | | |
| | GTTTCCTAAAAGTACTAGAAGCTTTAAAAAGCATGGACAGAACATCAGGAATATGGAATTAATAAT | | |
| | AGATGGCTCCACATTGTCACTCATACTAAATTCTAGTCAAGACTCTAGTTCACAATTACAAAAAAG | | |
| | CATTTTCCTACAAATATGTATGAAGTGTACTGCAGTGCTCTGCTGTCGGATGGCACCATTACAGAA | | |
| | AGCCCAGATTGTCAGAATGGTGAAGAATTTAAAAGGCAGCCCAATAACTCTGTCGATAGGTGATGG | | |
| | TGCCAATGATGTTAGTATGATCTTGGAATCCCATGTGGAATAAAGGTATTAAAGGCAAGAAAATCG | | |
| | CCAAGCAGCTAGATAGCGGAAAATTATTCTGTTCCAAAGTTTAAACACTTAAGAACTGCTGTTAAC | | |
| | TCATGGACATCTATATTATGTGAGAATAGCACACCTTGTAAAGTACTTCTTCTATAAGAACCTTTG | | |
| | TTTCATTTTGCCACAGTTTTTGTACCAGTTCTTCTGTGGATTCTCACAACAGCCACTGTATGATGC | | |
| | TGCTTACCTTACAATGTACAATATCTGCTTCACATCCTTGCCCATCCTGGCCTATAGTCTACTAAA | | |
| | ACAGCACATCAACATTGACACTCTGACCTCAGATCCCCGATTGTATATGAAAATTTCTGGCAATGC | | |
| | CATGCTACACTTGGGCCCCTTCTTATATTGGACATTTCTGGCTGCCTTTGAAGAAACAGTGTTCTT | | |
| | CTTTGGGACTTACTTTCTTTTTCAGAACTGCATCCCTAGAAGAAAATGGAAAGGTATACAAAACTG | | |
| | GACTTTTGGAACCATTGTTTTTACAGTCTTAAGTATTCACTGTAACCCTGAACTTGCCTTGGATAC | | |
| | CCGATTCTGGACGTGGATAAATCACTTTGTGATTTGGGGTTCTTTAGCCTTCTATGTATTTTTCTC | | |
| | ATTCTTCTGCGGAGGAATTATTTGGCCTTTTCTCAAGCAACAGAGAATGTATTTTGTATTTGCCCA | | |
| | AATGCTGTCTTCTGTATCCACATGGTTGGCTATAATTCTTCTAATATTTATCAGCCTGTTCCCTGA | | |
| | GATTCTTCTGATAGTATTAAAGAATGTAAGAAGAAGAAGTGCCAAAGTAAGAACTAGTCTGAGCTG | | |
| | TAGAAGGGCATCTGACTCATTATCCGCCAGACCTTCAGTCAGACCTCTTCTTTTACGAACATTCTC | | |
| | AGACGAATCTAATGTATTGTAACAGAATCCGAATCTTGAACTGCCTATGTTATTGTCCTACAAGCA | | |
| | TACTGACAGTGGTTACAGCTAAAAAAGAAAGCATGAAGAAACAAACTAAAAAAGTTATCATCTCAG | | |
| | GATACTTGATACGCAACACACTAAACCACTCTCATGTCTAGAGTTCACAATAAATGTTCATTAAAA | | |
| | TACCAAATGATTCTCTTAAGCATTTACCATTATTGTAAGTAGCCTTTATGGCCAAAGCTGTAAGTT | | |
| | ORF Start: ATG at 455 | | ORF Stop: TAA at 3848 |
| | SEQ ID NO:60 | 1131 aa | MW at 129671.9 kD |

| | |
|---|---|
| NOV 17a, | MFRRSLNRFCAGEEKRVGTRTVFVGNHPVSETEAYIAQRFCDNRIVSSKYTLWNFLPKNLFEQFRR |
| CG169201-01 | |
| Protein Sequence | IANFYFLIIFLVQVTVDTPTSPVTSGLPLFFVITVTAIKQGYEDWLRHRADNEVNKSTVYIIENAK |
| | RVRKESEKIKVGDVVEVQADETFPCDLILLSSCTTDGTCYVTTASLDGESNCKTHYAVRDTIALCT |
| | AESIDTLRAAIECEQPQPDLYKFVGRINIYSNSLEAVARSLGPENLLLKGATLAATEKIYGVAVYT |
| | GMETKMALNYQGKSQKRSAVEKSINAFLIVYLFILLTKAAVCTTLKYVWQSTPYNDEPWAAQKTQK |
| | ERETLKVLKMFTDFLSFMVLFNFIIPVSMYVTVEMQKFLGSFFISWDKDFYDEEINEGALVNTSDL |
| | NEELGQVDYVFTDKTGTLTENSMEFIECCIDGHKYKGVTQEVDGLSQTDGTLTYFDKVDKNREELF |
| | LRALCLCHTVEIKTNDAVDGATESAELTYISSSPDEIALVKGAKRYGFTFLGNRNGYMRVENQRKE |
| | IEEYELLHTLNFDAVRRRMSVIVKTQEGDILLPCKGADSAVFPRVQNHEIELTKVHVERNAMDGYR |
| | TLCVAFKEIAPDDYERINRQLIEAKMALQDREEKMEKVFDDIETNMNLIGATAVEDKLQDQAAETI |
| | EALHAAGLKVWVLTGDKMETAKSTCYACRLFQTNTELLELTTKTIEESERKEDRLHELLIEYRKKL |
| | LHEFPKSTRSFKKAWTEHQEYGLIIDCSTLSLILNSSQDSSSNNYKSIFLQICMKCTAVLCCRMAP |
| | LQKAQIVRMVKNLKGSPITLSIGDGANDVSMILESHVGIGIKGKEGRQAARNSDYSVPKFKHLKKL |
| | LLAHGHLYYVRIAHLVQYFFYKNLCFILPQFLYQFFCGFSQQPLYDAAYLTMYNICFTSLPILAYS |
| | LLEQHINIDTLTSDPRLYMKISGNAMLQLGPFLYWTFLAAFEGTVFFFGTYFLFQTASLEEMGKVY |
| | GNAATFGTIVFTVLVFTVTLKLALDTRFWTWINHVIWGSLAFYVFFSFAAAAIIWPFLKQQRMYFV |
| | EAQMLSSVSTWLAIILLIFISLFPEILLIVLKNVRRRSARVRTSLSCRRASDSLSARPSVRPLLLR |
| | TFSDESNVL |

[0447] Further analysis of the NOV17a protein yielded the following properties shown in Table 17B.

TABLE 17B
Protein Sequence Properties NOV17a

| SignalP | No Known Signal Sequence Predicted | | | | |
|---|---|---|---|---|---|
| analysis: | | | | | |
| PSORT II | PSG: a new signal peptide prediction method | | | | |
| analysis: | N-region: length 8; pos. chg 3; neg. chg 0 | | | | |
| | H-region: length 4; peak value −15.26 | | | | |
| | PSG score: −19.66 | | | | |
| | GvH: von Heijne's method for signal seq. recognition | | | | |
| | GvH score (threshold: −2.1): −10.47 | | | | |
| | possible cleavage site: between 32 and 33 | | | | |
| | >>> Seems to have no N-terminal signal peptide | | | | |
| | ALOM: Klein et al's method for TM region allocation | | | | |
| | Init position for calculation: 1 | | | | |
| | Tentative number of TMS(s) for the threshold 0.5: 8 | | | | |
| | INTEGRAL | Likelihood = | −2.39 | Transmembrane | 67-83 |
| | INTEGRAL | Likelihood = | −1.70 | Transmembrane | 88-104 |
| | INTEGRAL | Likelihood = | −7.06 | Transmembrane | 290-306 |
| | INTEGRAL | Likelihood = | −3.72 | Transmembrane | 347-363 |
| | INTEGRAL | Likelihood = | 0.16 | Transmembrane | 774-790 |
| | INTEGRAL | Likelihood = | −5.47 | Transmembrane | 997-1013 |
| | INTEGRAL | Likelihood = | −1.75 | Transmembrane | 1024-1040 |
| | INTEGRAL | Likelihood = | −12.21 | Transmembrane | 1070-1086 |
| | PERIPHERAL | Likelihood = | 0.90 | (at 961) | |

| ALOM score: −12.21 (number of TMSs: 8) | | | |
|---|---|---|---|
| MTOP: Prediction of membrane topology (Hartmann et al.) | | | |
| Center position for calculation: 74 | | | |
| Charge difference: −3.0 C(−1.0)-N( 2.0) | | | |
| N >= C: N-terminal side will be inside | | | |
| >>> membrane topology: type 3a | | | |
| MITDISC: discrimination of mitochondrial targeting seq | | | |
| R content: | 3 | Hyd Moment (75): | 20.21 |
| Hyd Moment (95): | 17.79 | G content: | 1 |
| D/E content: | 2 | S/T content: | 1 |

| Score: −1.16 | |
|---|---|
| Gavel: prediction of cleavage sites for mitochondrial preseq | |
| R-2 motif at 18 NRF\|CA | |
| NUCDISC: discrimination of nuclear localization signals | |
| pat4: none | |
| pat7: none | |
| bipartite: RKEDRLHELLIEYRKKL at 710 | |
| bipartite: RKKLLHEFPKSTRSFKK at 723 | |
| content of basic residues: 11.2% | |
| NLS Score: 0.51 | |
| KDEL: ER retention motif in the C-terminus: none | |
| ER Membrane Retention Signals: | |
| XXRR-like motif in the N-terminus: FRRS | |
| none | |
| SKL: peroxisomal targeting signal in the C-terminus: none | |
| PTS2: 2nd peroxisomal targeting signal: found | |
| KLLLAHGHL at 857 | |
| VAC: possible vacuolar targeting motif: none | |
| RNA-binding motif: none | |
| Actinin-type actin-binding motif: | |
| type 1: none | |
| type 2: none | |
| NMYR: N-myristoylation pattern: none | |
| Prenylation motif: none | |
| memYQRL: transport motif from cell surface to Golgi: none | |
| Tyrosines in the tail: none | |
| Dileucine motif in the tail: none | |
| checking 63 PROSITE DNA binding motifs: none | |
| checking 71 PROSITE ribosomal protein motifs: none | |
| checking 33 PROSITE prokaryotic DNA binding motifs: none | |
| NNCN: Reinhardt's method for Cytoplasmic/Nuclear | |
| discrimination | |
| Prediction: cytoplasmic | |
| Reliability: 94.1 | |
| COIL: Lupas's algorithm to detect coiled-coil regions | |
| 605 D | 0.83 |
| 606 D | 0.83 |
| 607 Y | 0.83 |
| 608 E | 0.85 |
| 609 R | 0.85 |
| 610 I | 0.85 |
| 611 N | 0.86 |
| 612 R | 0.95 |
| 613 Q | 0.96 |
| 614 L | 0.96 |
| 615 I | 0.96 |
| 616 E | 0.96 |
| 617 A | 0.96 |
| 618 K | 0.96 |
| 619 M | 0.96 |
| 620 A | 0.96 |
| 621 L | 0.96 |
| 622 Q | 0.96 |
| 623 D | 0.96 |
| 624 R | 0.96 |
| 625 E | 0.96 |
| 626 E | 0.96 |
| 627 K | 0.96 |
| 628 M | 0.96 |
| 629 E | 0.96 |
| 630 K | 0.96 |
| 631 V | 0.96 |
| 632 F | 0.96 |
| 633 D | 0.96 |
| 634 D | 0.96 |
| 635 I | 0.96 |
| 636 E | 0.96 |
| 637 T | 0.96 |
| 638 N | 0.96 |
| 639 M | 0.96 |
| 640 N | 0.96 |
| 641 L | 0.83 |
| 642 I | 0.53 |
| 697 L | 0.72 |
| 698 E | 0.72 |
| 699 L | 0.72 |
| 700 T | 0.72 |
| 701 T | 0.72 |
| 702 K | 0.72 |
| 703 T | 0.72 |
| 704 I | 0.72 |
| 705 E | 0.72 |
| 706 E | 0.72 |
| 707 S | 0.72 |
| 708 E | 0.72 |
| 709 R | 0.72 |
| 710 K | 0.72 |
| 711 E | 0.72 |
| 712 D | 0.72 |
| 713 R | 0.72 |
| 714 L | 0.72 |
| 715 H | 0.72 |
| 716 E | 0.72 |
| 717 L | 0.72 |
| 718 L | 0.72 |
| 719 I | 0.72 |
| 720 E | 0.72 |
| 721 Y | 0.72 |
| 722 R | 0.72 |
| 723 K | 0.72 |
| 724 K | 0.72 |
| 725 L | 0.72 |

total: 67 residues
Final Results (k = 9/23):
55.6%: endoplasmic reticulum
11.1%: mitochondrial
11.1%: vacuolar
11.1%: vesicles of secretory system
11.1%: Golgi
>> prediction for CG169201-01 is end (k = 9)

[0448] A search of the NOV17a protein against the Geneseq database, a proprietary database that contains sequences published in patents and patent publication, yielded several homologous proteins shown in Table 17C.

TABLE 17C
Geneseq Results for NOV17a

| | | NOV17a | Identities/ | |
|---|---|---|---|---|
| | | Residues/ | Similarities | |
| Geneseq | Protein/Organism/Length | Match | for the | Expect |
| Identifier | [Patent #, Date] | Residues | Matched Region | Value |
| ABP52158 | Human 67076 transporter protein | 1 . . . 1131 | 1127/1131 (99%) | 0.0 |
| | SEQ ID NO: 14 - Homo sapiens, | 1 . . . 1129 | 1128/1131 (99%) | |
| | 1129 aa. [WO200255701-A2, | | | |
| | 18 JUL. 2002] | | | |
| ABG61547 | Human transporter and ion channel, | 1 . . . 1131 | 1126/1131 (99%) | 0.0 |
| | TRICH17, Incyte ID 7477243CD1 - | 1 . . . 1129 | 1127/1131 (99%) | |
| | Homo sapiens, 1129 aa. | | | |
| | [WO200240541-A2, 23 MAY 2002] | | | |
| AAO14200 | Human transporter and ion channel | 1 . . . 1087 | 720/1100 (65%) | 0.0 |
| | TRICH-17 - Homo sapiens, 1192 aa. | 5 . . . 1096 | 874/1100 (79%) | |
| | [WO200204520-A2, 17 JAN. 2002] | | | |
| AAE24584 | Human phospholipid transporter, | 1 . . . 1109 | 725/1124 (64%) | 0.0 |
| | 67118 protein #2 - Homo sapiens, | 6 . . . 1121 | 882/1124 (77%) | |
| | 1135 aa. [WO200240674-A2, | | | |
| | 23 MAY 2002] | | | |
| AAE24583 | Human phospholipid transporter, | 1 . . . 1109 | 725/1124 (64%) | 0.0 |
| | 67118 #1 - Homo sapiens, 1134 aa. | 5 . . . 1120 | 882/1124 (77%) | |
| | [WO200240674-A2, 23 MAY 2002] | | | |

[0449] In a BLAST search of public sequence databases, the NOV17a protein was found to have homology to the proteins shown in the BLASTP data in Table 17D.

TABLE 17D
Public BLASTP Results for NOV17a

| | | NOV17a | | |
|---|---|---|---|---|
| Protein | | Residues/ | Identities/ | |
| Accession | | Match | Similarities for the | Expect |
| Number | Protein/Organism/Length | Residues | Matched Portion | Value |
| CAD44426 | Sequence 13 from Patent | 1 . . . 1131 | 1127/1131 (99%) | 0.0 |
| | WO02055701 - Homo sapiens | 1 . . . 1129 | 1128/1131 (99%) | |
| | (Human), 1129 aa. | | | |
| Q8WX24 | BB206I21.1 (ATPase, class VI, | 10 . . . 988 | 961/979 (98%) | 0.0 |
| | type 11C) - Homo sapiens (Human), | 1 . . . 962 | 961/979 (98%) | |
| | 962 aa (fragment). | | | |
| P98197 | Potential phospholipid-transporting | 1 . . . 1087 | 711/1103 (64%) | 0.0 |
| | ATPase IH (EC 3.6.3.1) - Mus | 5 . . . 1099 | 869/1103 (78%) | |
| | musculus (Mouse), 1187 aa. | | | |
| CAD44430 | Sequence 19 from Patent | 19 . . . 1083 | 611/1105 (55%) | 0.0 |
| | WO02055701 - Homo sapiens | 19 . . . 1089 | 788/1105 (71%) | |
| | (Human), 1177 aa. | | | |
| P98196 | Potential phospholipid-transporting | 338 . . . 1109 | 486/786 (61%) | 0.0 |
| | ATPase IS (EC 3.6.3.1) - Homo | 6 . . . 783 | 602/786 (75%) | |
| | sapiens (Human), 797 aa | | | |
| | (fragment). | | | |

[0450] PFam analysis predicts that the NOV17a protein contains the domains shown in the Table 17E.

TABLE 17E
Domain Analysis of NOV17a

| | | Identities/ | |
|---|---|---|---|
| | | Similarities | |
| Pfam | NOV17a Match | for the | Expect |
| Domain | Region | Matched Region | Value |
| Hydrolase | 403 . . . 837 | 42/449 (9%) | 0.019 |
| | | 262/449 (58%) | |

### Example 18.

[0451] The NOV18 clone was analyzed, and the nucleotide and encoded polypeptide sequences are shown in Table 18A.

TABLE 18A
NOV18 Sequence Analysis

| | SEQ ID NO:61 | 1992 bp | |
|---|---|---|---|
| NOV18a, | CTCTCTTTTGTTTCTCTTGCATGCAAGGCCCCATACTGTGGATCATGGCAAATCTGAGCCAGCCCT | | |
| CG50303-01 | | | |
| DNA Sequence | CCGAATTTGTCCTCTTGGGCTTCTCCTCCTTTGGTGAGCTGCAGGCCCTTCTGTATGGCCCCTTCC | | |
| | TCATGCTTTATCTTCTCGCCTTCATGGGAAACACCATCATCATAGTTATGGTCATAGCTGACACCC | | |
| | ACCTACATACACCCATGTACTTCTTCCTGGGCAATTTTTCCCTGCTGGAGATCTTAATAACCATGA | | |
| | CTGCAGTGCCCAGGATGCTCTCAGACCTGCTGGTCCCCCACAAAGTCATTACCTTCACTAACTGCA | | |
| | TGGTCCACTTCTACTTCCACTTTTCCCTGGGGTCCACCTCCTTCCTCATCCTGACAGACATGGCCC | | |
| | TTGATCGCTTTGTGGCCATCTGCCACCCACTGCGCTATGGCACTCTGATGAGCCAAGCTATGTGTG | | |
| | TCCAGCTGGCTGGGGCTGCCTGGGCAGCTCCTTTCCTAGCCATGGTACCCACTGTCCTCTCCCGAG | | |
| | TCCTATCTTGATTACTGCCATGCGACGTCATCAACCACTTCTTCTGTGACAATGAACCTCTCCTGC | | |
| | AGTTGTCATGCTCTGACACTCGCCTGTTCGAATTCTGGGACTTTCTGATGGCCTTGACCTTTGTCC | | |
| | TCAGCTCCTTCCTGGTGACCCTCATCTCCTATGGCTACATAGTGACCACTGTGCTGCAAATCCCCT | | |
| | CTGCCAGCAGCTGCCAGAAGGCTTTCTCCACTTGCGGGTCTCACCTCACACTAATCTTAATCAACT | | |
| | ACAGTAGTACCATCTTTCTGTATGTCAGGCCTGGCAAAGCTCACTCTGTGCAAGTAAGGAAGGTCG | | |
| | TGGCCTTGGTGACTTCAGTTCTCACCCCCTTTCTCAATCCCTTTATCCTTACCTTCTGCAATCAGA | | |
| | CAGTTAAAACAGTGCTACAGGGGCAGATGTAGAGGCTGAAAGGCCTTTGCAAAACACAATGATGAG | | |
| | CC | | |
| | ORF Start: ATG at 21 | | ORF Stop: TAG at 954 |
| | SEQ ID NO:62 | 311 aa | MW at 34714.8 kD |
| NOV18a, | MGGPTLWIMANLSQPSEFVLLGFSSFGELQALLYGPFLMLYLLAFMGNTIIIVMVIADTHLHTPMY | | |
| CG50303-01 | | | |
| Protein Sequence | FFLGNFSLLEILVTMTAVPRMLSDLLVPHKVITFTGCMVQFYFHFSLGSTSFLILTDMALDRFVAI | | |
| | CHPLRYGTLMSRANCVQLAGAAWAAPFLAMVPTVLSRAHLDYCHGDVIAAFFCDNEPLLQLSCSDT | | |
| | RLLEFWDFLMALTFVLSSFLVTLISYGYIVTTVLRIPSASSCQKAFSTCGSHLTLVFIGYSSTIFL | | |
| | YVPPGKAHSVOVRKVVALVTSVLTPFLNPFILTFCNQTVKTVLQCQM | | |
| | SEQ ID NO:63 | 964 bp | |
| NOV18b, | GGCCCCATACTGTGGATCATGGCAAATCTGAGCCAGCCCTCCGAATTTGTCCTCTTGGGCTTCTCC | | |
| CG50303-03 | | | |
| DNA Sequence | TCCTTTGGTGAGCTGCAGGCCCTTCTGTATGGCCCCTTCCTCATGCTTTATCTTCTCGCCTTCATG | | |
| | GGAAACACCATCATCATAGTTATGGTCATAGCTGACACCCACCTACATACACCCATGTACTTCTTC | | |
| | CTGGGCAATTTTTCCCTGCTGGAGATCTTGGTAACCATGACTGCAGTGCCCAAAATCCTCTCAGAC | | |
| | CTGTTGGTCCCCCACAAAGTCATTACCTTCACTGGCTGCATGGTCCAGTTCTACTTCCACTTTTCC | | |
| | CTGGGGTCCACCTCCTTCCTCATCCTGACAGACATGGCCCTTGATCGCTTTGTGGCCATCTGCCAC | | |
| | CCACTGCGCTATGGCACTCTGATGAGCCGGCTATGTGTGTCCAGCTGGCTGGAAGCTGCCTAAGCA | | |
| | GCTCCTTTCCTAGCCATGGTACCCACTGTCCTCTCCCGACCTCATCTTGATTACTGCCATGGCGAC | | |
| | GTCATCAACCACTTCTTCTGTGACAATGAACCTCTCCTGCAGTTGTCATGCTCTGACACTCGCCTG | | |
| | TTGGAATTCTGGGACTTTCTGATGGCCTTGACCTTTGTCCTCAGCTCCTTCCTGGTGACCCTCATC | | |
| | TCCTATGGCCTACATAGTGACCACTGTGCTGCGGATCCCCTCTGCCAGCAGCTGCCAGAAACTTTC | | |
| | TCCACTTGCGGGTCTCACCTCACACTGGTCTTCATCGGCTACAGTAGTACCATCTTTCTGTATGTC | | |
| | AGGCCTGGCAAAGCTCACTCTGTGCAAGTCAGGAAGGTCGTGGCCTTGGTGACTTCAGTTCTCACC | | |
| | ACGCCTGGCAAAGCTCACTCTGTGCAAGTCAGGAAGGTCGTGGCCTTGGTGACTTCAGTTCTCACC | | |
| | CCCTTTCTCAATCCCTTTATCCTTACCTTCTGCAATCAGACAGTTAAAACAGTGCTACAGAAGCAG | | |
| | ORF Start: ATG at 19 | | ORF Stop:TGA at 958 |
| | SEQ ID NO:64 | 313 aa | MW at 34902.0 kD |
| NOV18b, | TMANLSQPSEFVLLGFSSFGELQALLYGPFLMLYLLAFMGNTIIIVMVIADTHLHTPMYFFLGNFSL | | |
| CG50303-03 | | | |
| Protein Sequence | LEILETLVTMTAVPRMLSDLLVPHKVITFTGCMVQFYFHFSLGSTSFLILTDLDRAAAICHPLRYGT | | |
| | LMSRAMCVQLAGAAWAAPFLAMVPTVLSRAHLDYCHGDVINHFFCDNEPLLQLSCSDTRLLEEFWDF | | |
| | LMALTFVLSSFLVTLISYGYIVTTVLRIPSASSCQKAFSTCGSHLTLVFIGYSSTIFLYVRPGKAH | | |
| | SVQVRKVVALVTSVLTPFLNPFILTFCNQTVKTVLGGQMQRLICGLCKAQ | | |
| | SEQ ID NO:65 | 964 bp | |
| NOV18c, | CACCAAGCTTCCCACCATGGCAAATCTGAGCCAGCCCTCCGAATTTGTCCTCTTGGGCTTCTCCTC | | |
| 276863879 DNA | | | |
| Sequence | CTTTGGTGAGCTGCAGGCCCTTCTGTATGGCCCCTTCCTCATGCTTTATCTTCTCGCCTTCATGGG | | |
| | AAACACCATCATCATAGTTATGGTCATAGCTGACACCCACCTACATACACCCATGTACTTCTTCCT | | |
| | GGGCAATTTTTCCCTGCTGGAGATCTTGGTAACCATGACTGCAGTGCCCAAAATGCTCTCAGACCT | | |
| | GTTGGTCCCCCACAAAGTCATTACCTTCACTGGCTGCATGGTCCAGTTCTACTTCCACTTTTCCCT | | |
| | GGGGTCCACCTCCTTCCTCATCCTGACAGACATGGCCCTTGATCGCTTTGTGGCCATCTGCCACCC | | |
| | ACTCCGCTATGGCACTCTGATGAGCCGGGCTATGTGTGTCCAGCTAACTGGGGCTGCCTCAACAGC | | |
| | TCCTTTCCTAGCCATGGTACCCACTGTCCTCTCCCGAGCTCATCTTGATTACTGCCATGGCGACGT | | |
| | CATCAACCACTTCTTCTGTGACAATGAACCTCTCCTGCAGTTCTCATGCTCTGACACTCCCCTGTT | | |
| | GGAATTCTGGGACTTTCTGATGGCCTTGACCTTTGTCCTCAGCTCCTTCCTGGTGACCCTCATCTC | | |
| | CTATGGCTACATAGTGACCACTGTGCTGCGGATCCCCTCTGCCAGCAGCTGCCAGAAGGCTTTCTC | | |
| | CACTTGCGGGTCTCACCTCACACTGGTCTTCATCGGCTACAGTAGTACCATCTTTCTGTATGTCAG | | |
| | GCCTGGCAAAGCTCACTCTGTGCAAGTCAGGAAGGTCGTGGCCTTAATGACTTCAGTTCTCACCCC | | |
| | CTTTCTCAATCCCTTTATCCTTACCTTCTGCAATCAGACAGTTAAAACAGTGCTACAGGAAAAGAT | | |
| | GCAGAGGCTGAAAGGCCTTTGCAAGGCACAACTCGAGCAAC | | |
| | ORF Start: at 2 | | ORF Stop: end of sequence |
| | SEQ ID NO:66 | 321 aa | MW at 35742.0 kD |
| NOV18c, | TKLPTMANLSQPSEFVLLGFSSFGELQALLYGPFLMLYLLAFMGNTIIIVMVTADTHLHTPMYFFL | | |
| 276863879 | | | |
| Protein Sequence | GNFSLLEILVTMTAVPRMLSDLLVPHKVITFTGCMVQFYFHFSLGSTSFLILTDMALDRFVAICHP | | |
| | ILRYGTLMSRMCVQLAGAAWAAPFLAMVPTVLSRAHLDYCHGDVIAAFFCDNEPLLQLSCSDTRLL | | |
| | EFWDFLMALTFVLSSFLVTLISYGYIVTTVLRIPSASSCQKAFSTCGSHLTLVFIGYSSTIFLYVR | | |
| | PGKAHSVQVRKVVALVTSVLTPFLNPFILTFCNQTVKTVLGGQMQRLKGLCKAQLEG | | |
| | SEQ ID NO:67 | 769 bp | |
| NOV18d, | CACCAAGCTTGGAAACACCATCATCATAGTTATCGTCATAGCTGACACCCACCTAAATACACCCATG | | |
| 276863902 | | | |
| DNA Sequence | TACTTCTTCCTGGGCAATTTTTCCCTGCTGGAGATCTTGGTAACCATGACTGCAGTGCCCAGGATGC | | |
| | TCTCAGACCTGTTGGTCCCCCACAAAGTCATTACCTTCACTGGCTGCATAATCCAGTTCTACTTCCA | | |
| | CTTTTCCCTGGGGTCCACCTCCTTCCTCATCCTGACAGACATGGCCCTTGATCGCTTTGTAACCATC | | |
| | TGCCACCCACTGCGCTATGGCACTCTGATGAGCCGGGCTATGTGTGTCCAGCTGGCTAAGGCTGCCT | | |
| | GGGCAGCTCCTTTCCTAGCCATGGTACCCACTGTCCTCTCCCGAGCTCATCTTGATTACTGCCATAA | | |
| | CGACGTCATCAACCACTTCTTCTGTGACAATGAACCTCTCCTGCAGTTGTCATGCTCTGACACTCGC | | |
| | CTGTTGGAATTCTGGGACTTTCTGATGGCCTTGACCTTTGTCCTCAGCTCCTTCCTAATGACCCTCA | | |
| | TCTCCTATGGCTACATAGTGACCACTGTGCTGCGGATCCCCTCTGCCAGCAGCTGCCAGAAGGCTTT | | |
| | CTCCACTTGCGGGTCTCACCTCACACTGGTCTTCATCGGCTACAGTAGTACCATCTTTCTGTATGTC | | |
| | AGGCCTGGCAAAGCTCACTCTGTGCAAGTCAGGAAGGTCGTGGCCTTGGTGACTTCAGTTCTAACCC | | |
| | CCTTTCTCAATCCCTTTATCCTTCTCGAGGGC | | |
| | ORF Start: at 2 | | ORF Stop: end of sequence |
| | SEQ ID NO:68 | 256 aa | MW at 28495.4 kD |
| NOV18d, | THLGNTIIIVMVIADTHLHTPMYFFLGNFSLLEILVTMTAVPRMLSDLLVPHKVITFTGCMVQFYF | | |
| 27686390 | | | |
| Protein Sequence | HFSLGSTSFLILTDMALDRFVAICHPLRYGTLMSRAMCVQLAGAAWAAPFLAMVPAALSRAHLDYC | | |
| | HGDVINHFFCDWEPLLQLSCSDTRLLEFWDFLMALTFVLSSFLVTLISYGYIVTAALRIPSASSCQ | | |
| | KAFSTCGSHLTLVFIGYSSTIFLYVRPGKAHSVQVRKVVALVTSVLTPFLNPFILLEG | | |
| | SEQ ID NO:69 | 992 bp | |
| NOV18e, | CTGTCTTTTGTTTCTCTTGCATGCAAGGCCCCATACTGTGGATCATGGCAAATCTGAGCCAGCCCT | | |
| CG50303-01 | | | |
| DNA Sequence | CCGAATTTGTCCTCTTGGGCTTCTCCTCCTTTGGTGAGCTGCAAACCCTTCTGTATGGCCCCTTCC | | |
| | TCATGCTTTATCTTCTCGCCTTCATGGGAAACACCATCATCATAGTTATGGTCATAGCTGACACCC | | |
| | ACCTACATACACCCATGTACTTCTTCCTGGGCAATTTTTCCCTGCTGGAGATCTTAATAACCATGA | | |
| | CTGCAGTGCCCAGGATGCTCTCAGACCTGCTGGTCCCCCACAAAGTCATTACCTTCACTGGCTGCA | | |
| | TGGTCCAGTTCTACTTCCACTTTTCCCTGCGGTCCACCTCCTTCCTCATCCTGACAGACATAACCC | | |
| | TTGATCGCTTTGTGGCCATCTGCCACCCACTGCGCTATGGCACTCTGATGAGCCGGGCTATGTGTG | | |
| | TCCAGCTGGCTGGGGCTGCCTGGCCAGCTCCTTTCCTAGCCATGGTACCCACTGTCCTCTCCCGAG | | |
| | CTCATCTTGATTACTGCCATGGCGACGTCATCAACCACTTCTTCTGTGACAATGAACCTCTCCTGC | | |
| | AGTTGTCATGCTCTGACACTCCCCTGTTGGAATTCTGGGACTTTCTGATGGCCTTCACCTTTGTCC | | |
| | TCAGCTCCTTCCTGGTGACCCTCATCTCCTATGGCTACATAGTGACCACTGTGCTGCGGATCCCCT | | |
| | CTGCCAGCAGCTGCCAGAAGGCTTTCTCCACTTGCGGGTCTCACCTCACACTAATCTTCATCAACT | | |
| | ACAGTAGTACCATCTTTCTGTATGTCAGGCCTGGCAAAGCTCACTCTGTGCAAGTCAGGAAGGTCG | | |
| | TGGCCTTGGTGACTTCAGTTCTCACCCCCTTTCTCAATCCCTTTATCCTTACCTTCTGCAATCAGA | | |
| | CAGTTAAAACAGTGCTACAGGGGCAGATGTAGAGGCTGAAAGGCCTTTGCAAGGCACAATGATGAG | | |
| | CC | | |
| | ORF Start: ATG at 21 | | ORF Stop: TAG at 954 |
| | SEQ ID NO:70 | 311 aa | MW at 34714.8 kD |
| NOV18e, | MQGPILWIMANLSQPSEFVLLGFSSFGELQALLYGPFLMLYLLAFMGNTIIIVMVIADTHLHTPMY | | |
| CG50303-01 | | | |
| Protein Sequence | FFLGNFSLLEILVTMTAVPRMLSDLLVPHKVITFTGCMVQFYFHFSLGSTSFLILTDMALDRFVAI | | |
| | CHPLRYGTLMSRAMCVQLAGAAWAAPFLAMVPTVLSRAHLDYCHGDVINHFFCDNEPLLQLSCSDT | | |
| | RLLEFWDFLMALTFVLSSFLVTLISYGYIVTTVLRIPSASSCQKAFSTCGSHLTLVFIGYSSTIFL | | |
| | YVRPGKAHSVQVRKVVALVTSVLTPFLNPFILTFCNQTVKTVLQGQM | | |
| | SEQ ID NO:71 | 992 bp | |
| NOV18f, | CTGTCTTTTGTTTCTCTTGCATGCAAGGCCCCATACTGTGGATCATGGCAATCTGAGCCAGCCCT | | |
| CG50303-02 | | | |
| DNA Sequence | CCGAATTTGTCCTCTTGGGCTTCTCCTCCTTTCGTGACCTGCAGGCCCTTCTGTATAACCCCTTCC | | |
| | TCATGCTTTATCTTCTCGCCTTCATGGGAAACACCATCATCATAGTTATGGTCATAGCTGACACCC | | |
| | ACCTACATACACCCATGTACTTCTTCCTGGGCAATTTTTCCCTGCTGGAGATCTTGGTAACCATGA | | |
| | CTGCAGTGCCCAGGATGCTCTCAGACCTGTTGGTCCCCCACAAAGTCATTACCTTCACTGGCTGCA | | |
| | TGGTCCAGTTCTACTTCCACTTTTCCCTGGGGTCCACCTCCTTCCTCATCCTGACAGACATGGCCC | | |
| | TTGATCGCTTTGTGGCCATCTGCCACCCACTGCGCTATGGCACTCTGATGAGCCGGGCTATGTGTG | | |
| | TCCAGCTGGCTGGGGCTGCCTGGGCAGCTCCTTTCCTAGCCATGGTACCCACTGTCCTCTCCCGAG | | |
| | CTCATCTTGATTACTGCCATGGCGACGTCATTAACCACTTCTTCTGTGACAATGAACCTCTCCTGC | | |
| | AGTTGTCATGCTCTGACACTCGCCTGTTGGAATTCTGGGACTTTCTGATGGTCTTGACCTTTGTCC | | |
| | TCAGCTCCTTCCTGGTGACCCTCATCTCCTATGGCTACATAGTGACCACTGTGCTGCAAATCCCCT | | |
| | CTGCCAGCAGCTGCCAGAAGGCTTTCTCCACTTGCGGGTCTCACCTCACACTGGTCTTCATCGGCT | | |
| | ACAGTAGTACCATCTTTCTGTATGTCAGGCCTGGCAAAGCTCACTCTGTGCAAGTCAGGAAGGTCG | | |
| | TGGCCTTGGTGACTTCAGTTCTCACCCCCTTTCTCAATCCCTTTATCCTTACCTTCTGCAATCAGA | | |
| | CAGTTAAAACAGTGCTACAGGGGCAGATAATAGAGGCTGAAAGGCCTTTGCAAAACACAATGATGAG | | |
| | CC | | |
| | ORF Start: ATG at 21 | | ORF Stop: TAG at 954 |
| | SEQ ID NO:72 | 311 aa | MW at 34742.9 kD |

| | |
|---|---|
| NOV18f, | MGGPILWIMANLSQPSEFVLLGFSSFGELQALLYGPFLMLYLLAFMGNTIIIVMVIADTHLHTPMY |
| CG50303-02 | |
| Protein Sequence | FAALGNFSLLEILVTTAVPRMLSDLLVPHKVITFTGCMVQFYAAHFSLGSTSFLILTDAADRAAAI |
| | CHPLRYGTLMSRAMCVQLAGAAWAAPFLAMVPTVLSRAHLDYCHGDVINHFFCDNEPLLQLSCSDT |
| | RLLEFWDFLMVLTFVLSSFLVTLISYGYIVTTVLRIPSASSCQKAFSTCGSHLTLVFIGYSSTIFL |
| | YVRPGKAHSVQVRKVVALVTSVLTPFLNPFILTFCNQTVKTVLGGQM |

[0452] Sequence comparison of the above protein sequences yields the following sequence relationships shown in Table 18B.

TABLE 18B
Comparison of NOV18a against NOV18b through NOV18f

| Protein | NOV18a Residues/ | Identities/Similarities |
|---|---|---|
| Sequence | Match Residues | for the Matched Region |
| NOV18b | 9 . . . 311 | 303/303 (100%) |
| | 1 . . . 303 | 303/303 (100%) |
| NOV18c | 9 . . . 311 | 303/303 (100%) |
| | 6 . . . 308 | 303/303 (100%) |
| NOV18d | 46 . . . 296 | 250/251 (99%) |
| | 3 . . . 253 | 251/251 (99%) |
| NOV18e | 1 . . . 311 | 311/311 (100%) |
| | 1 . . . 311 | 311/311 (100%) |
| NOV18f | 1 . . . 311 | 310/311 (99%) |
| | 1 . . . 311 | 310/311 (99%) |

[0453] Further analysis of the NOV18a protein yielded the following properties shown in Table 18C.

TABLE 18C
Protein Sequence Properties NOV18a

| SignalP | Cleavage site between residues 58 and 59 | | | | |
|---|---|---|---|---|---|
| analysis: | | | | | |
| PSORT II | PSG: a new signal peptide prediction method | | | | |
| analysis: | N-region: length 0; pos. chg 0; neg. chg 0 | | | | |
| | H-region: length 16; peak value 8.74 | | | | |
| | PSG score: 4.34 | | | | |
| | GvH: von Heijne's method for signal seq. recognition | | | | |
| | GvH score (threshold: −2.1): −2.13 | | | | |
| | possible cleavage site: between 31 and 32 | | | | |
| | >>> Seems to have no N-terminal signal peptide | | | | |
| | ALOM: Klein et al's method for TM region allocation | | | | |
| | Init position for calculation: 1 | | | | |
| | Tentative number of TMS(s) for the threshold 0.5: 5 | | | | |
| | INTEGRAL | Likelihood = | −7.11 | Transmembrane | 40-56 |
| | INTEGRAL | Likelihood = | −0.48 | Transmembrane | 68-84 |
| | INTEGRAL | Likelihood = | −0.37 | Transmembrane | 147-163 |
| | INTEGRAL | Likelihood = | −7.48 | Transmembrane | 206-222 |
| | INTEGRAL | Likelihood = | −2.28 | Transmembrane | 279-295 |
| | PERIPHERAL | Likelihood = | 0.90 | (at 117) | |
| | ALOM score: −7.48 (number of TMSs: 5) | | | | |
| | MTOP: Prediction of membrane topology (Hartmann et al.) | | | | |
| | Center position for calculation: 47 | | | | |
| | Charge difference: 2.0 C(0.0)-N(−2.0) | | | | |
| | C > N: C-terminal side will be inside | | | | |
| | >>>Caution: Inconsistent mtop result with signal peptide | | | | |
| | >>> membrane topology: type 3b | | | | |
| | MITDISC: discrimination of mitochondrial targeting seq | | | | |
| | R content: | 0 | Hyd Moment (75): | 2.02 | |
| | Hyd Moment (95): | 3.18 | G content: | 1 | |
| | D/E content: | 1 | S/T content: | 2 | |

Score: −5.78
Gavel: prediction of cleavage sites for mitochondrial preseq
cleavage site motif not found
NUCDISC: discrimination of nuclear localization signals
pat4: none
pat7: none
bipartite: none
content of basic residues: 4.5%
NLS Score: −0.47
KDEL: ER retention motif in the C-terminus: none
ER Membrane Retention Signals: none
SKL: peroxisomal targeting signal in the C-terminus: none
PTS2: 2nd peroxisomal targeting signal: none
VAC: possible vacuolar targeting motif: none
RNA-binding motif: none
Actinin-type actin-binding motif:
type 1: none
type 2: none
NMYR: N-myristoylation pattern : none
Prenylation motif: none
memYQRL: transport motif from cell surface to Golgi: none
Tyrosines in the tail: none
Dileucine motif in the tail: none
checking 63 PROSITE DNA binding motifs:
Leucine zipper pattern (PS00029): *** found ***
LSCSDTRLLEFWDFLMALTFVL at 193
none
checking 71 PROSITE ribosomal protein motifs: none
checking 33 PROSITE prokaryotic DNA binding motifs: none
NNCN: Reinhardt's method for Cytoplasmic/Nuclear
discrimination
Prediction: cytoplasmic
Reliability: 94.1
COIL: Lupas's algorithm to detect coiled-coil regions
total: 0 residues
Final Results (k = 9/23):
44.4%: endoplasmic reticulum
22.2%: vacuolar
11.1%: Golgi
11.1%: vesicles of secretory system
11.1%: mitochondrial
>> prediction for CG50303-01 is end (k = 9)

[0454] A search of the NOV18a protein against the Geneseq database, a proprietary database that contains sequences published in patents and patent publication, yielded several homologous proteins shown in Table 18D.

TABLE 18D
Geneseq Results for NOV18a

| | | NOV18a | Identities/ | |
|---|---|---|---|---|
| | | Residues/ | Similarities | |
| Geneseq | Protein/Organism/Length | Match | for the | Expect |
| Identifier | [Patent #, Date] | Residues | Matched Region | Value |
| ABG76789 | Human G-protein coupled receptor | 1 . . . 311 | 311/311 (100%) | e−180 |
| | (GPCR) protein #23 - Homo sapiens, | 1 . . . 311 | 311/311 (100%) | |
| | 321 aa. [WO200259313-A2, | | | |
| | 01 AUG. 2002] | | | |
| ABG76788 | Human G-protein coupled receptor | 1 . . . 311 | 311/311 (100%) | e−180 |
| | (GPCR) protein #22 - Homo sapiens, | 21 . . . 331 | 311/311 (100%) | |
| | 341 aa. [WO200259313-A2, | | | |
| | 01 AUG. 2002] | | | |
| ABG66926 | Novel G-protein coupled receptor | 1 . . . 311 | 311/311 (100%) | e−180 |
| | related protein #4 - Mus musculus, | 7 . . . 317 | 311/311 (100%) | |
| | 327 aa. [WO200240539-A2, | | | |
| | 23 MAY. 2002] | | | |
| AAU85292 | G-coupled olfactory receptor #153 - | 1 . . . 311 | 311/311 (100%) | e−180 |
| | Homo sapiens, 399 aa. | 79 . . . 389 | 311/311 (100%) | |
| | [WO200198526-A2, 27 DEC. 2001] | | | |
| ABG66928 | Novel G-protein coupled receptor | 1 . . . 311 | 310/311 (99%) | e−180 |
| | related protein #6 - Mus musculus, | 1 . . . 311 | 310/311 (99%) | |
| | 311 aa. [WO200240539-A2, | | | |
| | 23 MAY 2002] | | | |

[0455] In a BLAST search of public sequence databases, the NOV18a protein was found to have homology to the proteins shown in the BLASTP data in Table 18E.

TABLE 18E
Public BLASTP Results for NOV18a

| | | NOV18a | Identities/ | |
|---|---|---|---|---|
| Protein | | Residues/ | Similarities | |
| Accession | | Match | for the | Expect |
| Number | Protein/Organism/Length | Residues | Matched Portion | Value |
| CAC69319 | Sequence 1 from Patent | 1 . . . 311 | 310/311 (99%) | e−179 |
| | WO0159117 - Homo sapiens | 79 . . . 389 | 310/311 (99%) | |
| | (Human), 399 aa. | | | |
| Q8N148 | Seven transmembrane helix | 9 . . . 311 | 303/303 (100%) | e−174 |
| | receptor - Homo sapiens | 1 . . . 303 | 303/303 (100%) | |
| | (Human), 313 aa. | | | |
| Q8NG79 | Seven transmembrane helix | 9 . . . 308 | 159/300 (53%) | 1e−88 |
| | receptor - Homo sapiens | 1 . . . 298 | 212/300 (70%) | |
| | (Human), 313 aa. | | | |
| Q96RR8 | Olfactory receptor 6W1 (Olfactory | 20 . . . 308 | 155/289 (53%) | 2e−88 |
| | receptor sdolf) - Homo sapiens | 11 . . . 299 | 208/289 (71%) | |
| | (Human), 314 aa (fragment). | | | |
| Q8NGD8 | Seven transmembrane helix | 46 . . . 308 | 143/263 (54%) | 1e−81 |
| | receptor - Homo sapiens | 3 . . . 265 | 192/263 (72%) | |
| | (Human), 280 aa. | | | |

[0456] PFam analysis predicts that the NOV18a protein contains the domains shown in the Table 18F.

TABLE 18F
Domain Analysis of NOV18a

| | | Identities/ | |
|---|---|---|---|
| | | Similarities | |
| | NOV18a | for the | Expect |
| Pfam Domain | Match Region | Matched Region | Value |
| 7tm_1 | 47 . . . 296 | 55/268 (21%) | 4.3e−29 |
| | | 167/268 (62%) | |

### Example 19.

[0457] The NOV19 clone was analyzed, and the nucleotide and encoded polypeptide sequences are shown in Table 19A.

TABLE 19A
NOV19 Sequence Analysis

| | SEQ ID NO:73 | 1113 bp | |
|---|---|---|---|
| NOV19a, | ATGAATTAAACTCAATCGTGATGGTGGTGATGACCGGTACGCGTAGAATCGAGACCGAGGAGAGGG | | |
| CG54092-03 | | | |
| DNA Sequence | TTAGGGATAGGCTTACCCTCGACGATGGACTTCCACCGGGCCCCAAGCCTGGGAGCCTGCCCGCCA | | |
| | CGCACGACCCCCGGGCTCGACGGGGGCGAAAAGCCCAGGTTGTCGCGGGCGCACCTCTCCAGCTTG | | |
| | TGCACGTGGCAGAAGACACAGGCGGAGCCCACGGAGCGCGCCGGGCGGCGGGGCAGCCAGAGCCCA | | |
| | CGGCTCTCGGGCGCCCCCGGGGGGCGCGGGCTGGGGGTGCGGGCAGCGCGCTCGGGCCACTCGGCG | | |
| | CTGGCAACGAGGAAGCGCAGGACCACCAGGTTGAGGAAGGCGCCAATGACCGTGAGCCCCAGGAGG | | |
| | ATGTAGAGGAAGCTGAAGGCCACGTAGGGGAGCTTCCTCTGCAGCGCCTCGCCGCTCTGCAGTGCC | | |
| | ACGAAGTCGCCGAAGCCGATGGTGGTGAGGGTGATGAAGCAGTAGTAGTAGGCGTGGAAGAAGGTC | | |
| | CAGCCCTCGAAGTGCGAGAAGGCGACGGCCCCCACGGCCAGGGTGGCGGCACACGCCAGCAGCCCG | | |
| | GCCACCACCAGGTTCTCCGTGGACACGCACGTCCACCGCAGGCCCAGGCAGCACTTGGCCGCCAAC | | |
| | AGGAGGCGCCGCACCACCGCGTTCAGCCGTTCGCCCAGGCTCTGGAAAGTGACCAGCGTCAGCGGG | | |
| | ATGCCCAGGAGCGCGTAGAACATGCAGAAGACCTTGCCGGAGTCCGTACCCGGCGCGGCGTGGCCG | | |
| | TACTCGATGGTAGTGATGACGGTGATGGCGAAGTAGAAGGAGCCGGGGAACTTCCACTGGCGGCCG | | |
| | GCGCGGTGGGGCTCAGCCTGGAGCGCCAGGCGCTCCAGCTCGCGGTAGTCCTCGGCCGAGAAGCCG | | |
| | AACTTCCTCCGGAGAGCGCCCCGCTTCTGGACCAGCAGTCGCTGGCGGCCGCTTTCCGCCTCGGAC | | |
| | TCGAGCGCGTCGAAGACAGCAGCGCCCACCAGCAGGTAACACAGGGTGCACAGGACCAGCCCGGCC | | |
| | GCGCGCACGCTCCGCCTCCGCATGGTGGATCCTCCCGAAGATCTTCTGAAAAGCTTC | | |
| | ORF Start: at 3 | | OFR Stop: at 1113 |
| | SEQ ID NO:74 | 370 aa | MW at 38623.0 kD |
| NOV19a, | ELNSMVMVVMTGTRRIETEERVRDRLTLDDGLPPGPKPGSLPATHDPRARCGRKAQVVAGAPLQLV | | |
| CG54092-03 | | | |
| Protein Sequence | HVAEDRGGAHGAGRAACQPEATALGRPRGARAGGAGSALGPVGAGNEEAQDHQVEEGANDREPQED | | |
| | VEEAEGHVGELPLQRLAALQCHEVAEADGGEGDEAVVVGVEEGPALEVREGDGPEGGGGGTRQQPG | | |
| | HHQVLRGHARPPQAQAALGRQQEAPHHRVQPFAQALESDQRQRDAQERVEHAEDLAGVRTRRGVAV | | |
| | LDGSDDGDGEVEGAGELPLAAGAVGLSLERQALQLAVVLGREAELPPESAPLLDQQSLAAAFRLGL | | |
| | ERVEDSSAHQQVTGGAQDQPGRAHARPPHGGSSRRSSEKL | | |
| | SEQ ID NO:75 | 1216 bp | |
| NOV19b, | ATGCGGAGGCCGAGCGTGCGCGCGGCCGGGCTGGTCCTGTGCACCCTGTGTTACCTGCTGGTGGGC | | |
| CG54092-01 | | | |
| DNA Sequence | GCTGCTGTCTTCGACGCGCTCGAGTCCGAGGCGGAAAGCGGCCGCCAGCGACTGCTGGTCCAGAAG | | |
| | CCGGGCGCTCTCCGGAGGAAGTTCGGCTTCTCGGCCGAGGACTACCGCGAGCTGGAGCGCCTGGCG | | |
| | CTCCACGCTGAGCCCCACCGCGCCGGCCGCCAGTGGAAGTTCCCCGGCTCCTTCTACTTCGCCATC | | |
| | ACCGTCATCACTACCATCGAGTACGGCCACGCCGCGCCGGGTACGGACTCCGGCAAGGTCTTCTGC | | |
| | ATGTTCTACGCGCTCCTGCGCATCCCGCTGACGCTGGTCACTTTCCAGAGCCTGGGCGAACGGCTG | | |
| | AACGCGGTGGTGCGGCGCCTCCTGTTGGCGGCCAAGTGCTGCCTGGGCCTGCGGTGGACGTGCGTG | | |
| | TCCACGGAGAACCTGGTGGTCGCCCGGCTGCTGGCGTGTGCCGCCACCCTGGCCCTCGGGGCCGTC | | |
| | GCCTTCTCGCACTTCGAGGGCTGGACCTTCTTCCACGCCTACTACTACTGCTTCATCACCCTCACC | | |
| | ACCATCGGCTTCGGCGACTTCGTGGCACTGCAGAGCGGCGAGGCGCTGCAGAGGAAGCTCCCCTAC | | |
| | GTGGCCTTCAGCTTCCTCTACATCCTCCTGGGCCTCACGGTCATTGGCGCCTTCCTCAACCTCGTG | | |
| | GTCCTGCGCTTCCTCGTTGCCAGCGCCGACTGGCCCGAGCGCGCTGCCCGCACCCCCAGCCCGCGC | | |
| | CCCCCGGGGGCGCCCGAGAGCCGTGGCCTCTGGCTGCCCCGCCGCCCGGCCCGCTCCGTGGGCTCC | | |
| | GCCTCTGTCTTCTGCCACGTGCACAAGCTGGAGAGGTGCGCCCGCGACAACCTGGGCTTTTCGCCC | | |
| | CCCTCGAGCCCGGGGGTCGTGCGTGGCGCGCAGGCTCCCAGGCTTGGGGCCCGGTGGAAGTCCATC | | |
| | TGACAACCCCACCCAGGCCAGGGTCGAATCTGGAATGGGAGGGTCTGGCTTCAGCTATCAGGGCAC | | |
| | CCTCCCCAGGGATTGGAAACGGATGACGGGCCTTTAGGCGGTTTTTTGCCACGAGCAGTTTTTCAT | | |
| | TACTGTCTGTCGCTAAGTCCCCTCCCTCCTTTCCAAAAATATATTACAGTCACCCCATAAGCCCAA | | |
| | AAAAAAAAAAAAA | | |
| | ORF Start: ATG at 1 | | ORF Stop:TGA at 991 |
| | SEQ ID NO:76 | 330 aa | MW at 36221.8 kD |
| NOV19b, | MRRPSVRAAGLVLCTLCYLLVGAAVFDALESEAESGRQRLLVQKRGALRRKFGFSAEDYRELERLA | | |
| CG54092-01 | | | |
| Protein Sequence | LQAEPHRAGRQWKFPGSFYFAITVITTIEYGHAAPGTDSGKVFCMFYALLGTPLTLVTFQSLGERL | | |
| | NAVVRRLLLAAKCCLGLRWTCVSTENLVVAGLLACAATLALGAVAFSHFEGWTFFHAYYYCFITLT | | |
| | TIGFGDFVALQSGEALQRKLPYVAFSFLYILLGLTVIGAFLNLVVLkFLVASADWPERAARTPSPR | | |
| | PPGAPESRGLWLPRRPARSVGSASVFCHVHKLERCARDNLGFSPPSSPGVVRGGQAPRLGARWKSI | | |
| | SEQ ID NO:77 | 1113 bp | |
| NOV19c, | ATGAATTAAACTCAATGGTGATGGTGGTGATGACCGGTACGCGTAGAATCGAGACCGAGGAGAGGG | | |
| CG54092-03 | | | |
| DNA Sequence | TTAGGGATAGGCTTACCCTCGACGATGGACTTCCACCGGGCCCCAAGCCTGGGAGCCTGCCCGCCA | | |
| | CGCACGACCCCCGGGCTCGAGGGGGGCGAAAAGCCCAGGTTGTCGCGGGCGCACCTCTCCAGCTTG | | |
| | TGCACGTGGCAGAAGACAGAGGCCGAGCCCACGGAGCGGGCCGGGCGGCGGGGCAGCCAGAGGCCA | | |
| | CGGCTCTCGGGCGCCCCCGGGGGGCGCGGGCTGGGGGTGCGGGCAGCGCGCTCGGGCCAGTCGGCG | | |
| | CTGGCAACGAGGAAGCGCACGACCACCAGGTTGAGGAAGGCGCCAATGACCGTGAGCCCCAGGAGG | | |
| | ATGTAGAGGAAGCTGAAGGCCACGTAGGGGACCTTCCTCTGCAGCGCCTCGCCGCTCTGCAGTGCC | | |
| | ACGAAGTCGCCGAGCCGATGGTGGTGAGGGTGATGAAGCAGTAGTAGTAGGCGTGGAAGAACGTC | | |
| | CAGCCCTCGAAGTGCGAGAAGGCGACGGCCCCGAGGGCCAGGGTGGCGGCACACGCCAGCAGCCCG | | |
| | GCCACCACCAGGTTCTCCGTGGACACGCACGTCCACCGCAGGCCCAGCCAGCACTTGGCCGCCAAC | | |
| | AGGAGGCGCCGCACCACCGCGTTCAGCCGTTCGCCCAGGCTCTGGAAAGTGACCAGCGTCAGCGGG | | |
| | ATGCCCAGGAGCGCGTAGAACATGCAGAAGACCTTGCCCGAGTCCGTACCCGGCGCGGCGTGGCCG | | |
| | TACTCGATGGTAGTGATGACGGTGATGGCGAAGTAGAAGGAGCCGGGGAACTTCCACTGGCGGCCC | | |
| | GCGCGGTGGGGCTCAGCCTGGAGCGCCAGGCGCTCCAGCTCGCGGTAGTCCTCGGCCGAGAAGCCG | | |
| | AACTTCCTCCGGAGAGCGCCCCGCTTCTGGACCAGCAGTCGCTGGCGGCCGCTTTCCGCCTCGGAC | | |
| | TCGAGCGCGTCGAAGACAGCAGCGCCCACCAGCAGGTAACACAGGGTGCACAGGACCAGCCCGGCC | | |
| | GCGCGCACGCTCGGCCTCCGCATGGTGGATCCTCGCGAAGATCTTCTGAAAAGCTTC | | |
| | ORF Start: at 3 | | ORF Stop: at 1113 |
| | SEQ ID NO:78 | 370 aa | MW at 38623.0 kD |
| NOV19c, | ELNSMVMVVMTGTRRIETEERVRDRLTLDDGLPPGPKPGSLPATHDPRARGGRKAQVVAGAPLQLV | | |
| CG54092-03 | | | |
| Protein Sequence | HVAEDRGGAHGAGRAAGQPEATALGRPRGARAGCAGSALGPVGAGNEEAQDHQVEEGANDREPQED | | |
| | VEEAEGHVGELPLQRLAALQCHEVAEADGGEGDEAVVVGVEEGPALEVREGDGPEGGGGGTRQQPG | | |
| | MHQVLRGHARPPQAQAALGRQQEAPHHRVQPFAQALESDQRQRDAQERVEHAEDLAGVRTRRGVAV | | |
| | LDGSDDGDGEVEGAGELPLAAGAVGLSLERQALQLAVVLGREAELPPESAPLLDQQSLAAAFRLGL | | |
| | ERVEDSSANQQVTGGAQDQPGRAHARPPHGGSSRRSSEKL | | |
| | SEQ ID NO:79 | 265 bp | |
| NOV19d, | GCCGTCGACAAAGTCCGTACCCAACGCAACGTGGCCGTACCCGATAATAGTGATGACGGTGATGGC | | |
| 262770591 DNA | | | |
| Sequence | CAAGTAGAAGGAGCCGGGGAACTTCCACTGGCGGCCGGCGCGGTGGGGCTCAGCCTGGAGCGCCAG | | |
| | GCGCTCCAGCTCGCGGTAGTCCTCGGCCGAGAAGCCGAACTTCCTCCCGAGAGCGCCCCGCTTCTG | | |
| | GACCAGCAGTCGCTGGCGGCCGCTTTCCGCCTCGGACTCGAGCGCGTCGAAGACAGCGGATCCGGT | | |
| | ORF Start: at 1 | | ORF Stop: end of sequence |
| | SEQ ID NO:80 | 89 aa | MW at 8876.7 kD |
| NOV19d, | AVDGVRTRRGVAVPDGSDDGDGEVEGAGELPLAAGAVGLSLERQALQLAVVLGREAELPPESAPLL | | |
| 262770591 | | | |
| Protein Sequence | DQQSLAAAFRLGLERVEDSGSGX | | |
| | SEQ ID NO:81 | 265 bp | |
| NOV19e, | GCCGTCGACGGAGTCCGTACCCGGCGCGGCGTGGCCGTACTCGATGGTAGTGATGACGGTGATGGC | | |
| 262770609 DNA | | | |
| Sequence | GAAGTAGAAGGAGCCGGGGAACTTCCACTGGCGCCCGGCGCGGTGGGGCTCAGCCTGGAGCGCCAG | | |
| | GCGCTCCAGCTCGCGGTAGTCCTCGGCCGAGAACCCGAACTTCCTCCGGAGAGCGCCCCGCTTCTG | | |
| | GACCAGCAGTCGCTGGCGGCCGCTTTCCGCCTCGGACTCGAGCGCGTCGAAGACAGCGGATCCGGT | | |
| | ORF Start: at 1 | | ORF Stop: end of sequence |
| | SEQ ID NO:82 | 89 aa | MW at 8892.7 kD |
| NOV19e, | AVDGVRTRRGVAVLDGSDDGDGEVEGAGELPLAAGAVGLSLERQALQLAVVLGREAELPPESAPLL | | |
| 262770609 | | | |
| Protein Sequence | DQQSLAAAFRLGLERVEDSGSGX | | |
| | SEQ ID NO:83 | 1113 bp | |
| NOV19f | ATGAATTAAACTCAATGGTGATGGTGGTGATGACCGGTACGCGTAGAATCGAGACCGAGGAGAGGG | | |
| 296457330 DNA | | | |
| Sequence | TTAGGGATAGGCTTACCCTCGACGATGGACTTCCACCGGGCCCCAAGCCTGGGAGCCTGCCCGCCA | | |
| | CGCACGACCCCCGGGCTCGAGGGGGGCGAAAAGCCCAGGTTGTCGCGGGCGCACCTCTCCAGCTTG | | |
| | TGCACGTGGCAGAAGACAGAGGCGGAGCCCACGGAGCGGGCCGGGCGGCGGGGCAGCCAGAGGCCA | | |
| | CGGCTCTCGGGCGCCCCCGGGGGGCGCGGGCTGGCGGTGCGGGCAGCGCGCTCGGGCCAGTCGGCG | | |
| | CTGGCAACGAGGAAGCGCAGGACCACCAGGTTGAGGAAGGCGCCAATGACCGTGAGCCCCAGGAGG | | |
| | ATGTAGAGGAAGCTGAAGGCCACGTAGGGGAGCTTCCTCTGCAGCGCCTCGCCGCTCTGCAGTGCC | | |
| | ACGAAGTCGCCGAAGCCGATGGTGGTGAGGGTGATGAAGCAGTAGTAGTACGCGTGGAAGAAGGTC | | |
| | CAGCCCTCGAAGTGCGAGAAGGCGACGGCCCCGAGGGCCAGGGTGGCGGCACACGCCAGCAGCCCG | | |
| | GCCACCACCAGGTTCTCCGTGGACACGCACGTCCACCGCAGGCCCAGGCAGCACTTGGCCGCCAAC | | |
| | AGGAGGCGCCGCACCACCGCGTTCAGCCGTTCGCCCAGGCTCTGGAAAGTGACCAGCGTCAGCGGG | | |
| | ATGCCCAGGAGCCCGTAGAACATGCAGAAGACCTTGCCGGAGTCCGTACCCGGCGCGGCGTGGCCG | | |
| | TACTCGATGGTAGTGATGACGAAGATGGCGAAGTAGAAGGAGCCGGGGAACTTCCACTGGCGGCCG | | |
| | GCGCGGTGGGGCTCAGCCTGGAGCGCCAGGCGCTCCAGCTCGCGGTAGTCCTCGGCCGAGAAGCCG | | |
| | AACTTCCTCCGGAGAGCGCCCCGCTTCTGGACCAGCAGTCGCTGGCGGCCGCTTTCCGCCTCGGAC | | |
| | TCGAGCGCGTCGAAGACAGCAGCGCCCACCAGCAGGTAACACAGGGTGCACAGGACCAGCCCCGCC | | |
| | GCGCGCACGCTCGGCCTCCGCATGGTGGATCCTCGCGAACATCTTCTGAAAAGCTTC | | |
| | ORF Start: at 3 | | ORF Stop: end of sequence |
| | SEQ ID NO:84 | 371 aa | MW at 38623.0 kD |
| NOV19f, | ELNSMVMVVMTGTRRIETEERVRDRLTLDDGLPPGPKPGSLPATHDPRARGGRKAQVVAGAPLQLV | | |
| 29645330 | | | |
| Protein Sequence | HVAEDRGGAHGAGRAAGQPEATALGRPRGARAGGAGSALGPVGAGNEEAQDHQVEEGANDREPQED | | |
| | VEEAEGHVGELPLQRLAALQCHEVAEADGGEGDEAVVVGVEEGPALEVREGDGPEGGGGGTRQQPG | | |
| | HHQVLRGHARPPQAQAALGRQQEAPHHRVOPFAQALESDQRQRDAQERVEHAEDLAGVRTRRGVAV | | |
| | LDGSDDGDGEVEGAGELPLAAGAVGLSLERQALQLAVVLGREAELPPESAPLLDQQSLAAAFRLGL | | |
| | ERVEDSSAHQQVTQCAQDQPGRAHARPPHGGSSRRSSEKLX | | |
| | SEQ ID NO:85 | 265 bp | |
| NOV19g, | CACCGGATCCGCTGTCTTCGACGCGCTCGAGTCCGAGGCGGAAAGCGGCCGCCAGCGACTGCTGGT | | |
| CG54092-02 | | | |
| DNA Sequence | CCAGAAGCGGGGCGCTCTCCGGAGGAAGTTCGGCTTCTCGGCCGAGGACTACCGCGAGCTGGAGCG | | |
| | CCTGGCGCTCCAGGCTGAGCCCCACCGCGCCGGCCGCCAGTGGAAGTTCCCCGGCTCCTTCTACTT | | |
| | CGCCATCACCGTCATCACTACCATCGGGTACGGCCACGCCGCGCCGGGTACGGACTCCGTCGACGGC | | |
| | ORF Start: at 11 | | ORF Stop: end of sequence |
| | SEQ ID NO:86 | 85 aa | MW at 9472.5 kD |

| | |
|---|---|
| NOV19g, | AVFDALESEAESGRQRLLVQKRGALRKFGFSADYRELERLLQAEPAAAGRQWKFPGSFYFAIT |
| CG54092-02 | |
| Protein Sequence | VITTIGYGHAAPGTDSVDG |

[0458] Sequence comparison of the above protein sequences yields the following sequence relationships shown in Table 19B.

TABLE 19B
Comparison of NOV19a against NOV19b through NOV19g

| Protein | NOV19a Residues/ | Identities/Similarities |
|---|---|---|
| Sequence | Match Residues | for the Matched Region |
| NOV19b | 58 . . . 126 | 19/69 (27%) |
| | 234 . . . 302 | 24/69 (34%) |
| NOV19c | 1 . . . 370 | 370/370 (100%) |
| | 1 . . . 370 | 370/370 (100%) |
| NOV19d | 255 . . . 338 | 81/84 (96%) |
| | 4 . . . 87 | 82/84 (97%) |
| NOV19e | 255 . . . 338 | 82/84 (97%) |
| | 4 . . . 87 | 83/84 (98%) |
| NOV19f | 1 . . . 370 | 370/370 (100%) |
| | 1 . . . 370 | 370/370 (100%) |
| NOV19g | 292 . . . 298 | 6/7 (85%) |
| | 39 . . . 45 | 6/7 (85%) |

[0459] Further analysis of the NOV19a protein yielded the following properties shown in Table 19C.

TABLE 19C
Protein Sequence Properties NOV19a

| SignalP | No Known Signal Sequence Predicted | | | |
|---|---|---|---|---|
| analysis: | | | | |
| PSORT II | PSG: a new signal peptide prediction method | | | |
| analysis: | N-region: length 1; pos. chg 0; neg. chg 1 | | | |
| | H-region: length 12; peak value 0.00 | | | |
| | PSG score: −4.40 | | | |
| | GvH: von Heijne's method for signal seq. recognition | | | |
| | GvH score (threshold: −2.1): −9.10 | | | |
| | possible cleavage site: between 18 and 19 | | | |
| | >>> Seems to have no N-terminal signal peptide | | | |
| | ALOM: Klein et al's method for TM region allocation | | | |
| | Init position for calculation: 1 | | | |
| | Tentative number of TMS(s) for the threshold 0.5: 0 | | | |
| | number of TMS(s) . . . fixed | | | |
| | PERIPHERAL Likelihood = 3.23 (at 287) | | | |
| | ALOM score: 3.23 (number of TMSs: 0) | | | |
| | MITDISC: discrimination of mitochondrial targeting seq | | | |
| | R content: | 2 | Hyd Moment(75): | 1.38 |
| | Hyd Moment(95): | 2.09 | G content: | 1 |
| | D/E content: | 2 | S/T content: | 3 |

```
Score: −5.92
Gavel: prediction of cleavage sites for mitochondrial preseq
R-2 motif at 25 RRI|ET
NUCDISC: discrimination of nuclear localization signals
pat4: none
pat7: none
bipartite: none
content of basic residues: 10.3%
NLS Score: −0.47
KDEL: ER retention motif in the C-terminus: none
ER Membrane Retention Signals:
KKXX-like motif in the C-terminus: SSEK
SKL: peroxisomal targeting signal in the C-terminus: none
PTS2: 2nd peroxisomal targeting signal: none
VAC: possible vacuolar targeting motif: none
RNA-binding motif: none
Actinin-type actin-binding motif:
type 1: none
type 2: none
NMYR: N-myristoylation pattern : none
Prenylation motif: none
memYQRL: transport motif from cell surface to Golgi: none
Tyrosines in the tail: none
Dileucine motif in the tail: none
checking 63 PROSITE DNA binding motifs: none
checking 71 PROSITE ribosomal protein motifs: none
checking 33 PROSITE prokaryotic DNA binding motifs: none
NNCN: Reinhardt's method for Cytoplasmic/Nuclear
discrimination
Prediction: cytoplasmic
Reliability: 76.7
COIL: Lupas's algorithm to detect coiled-coil regions
total: 0 residues
Final Results (k = 9/23) :
69.6%: cytoplasmic
17.4%: nuclear
  4.3%: mitochondrial
  4.3%: plasma membrane
  4.3%: peroxisomal
>> prediction for CG54092-03 is cyt (k = 23)
```

[0460] A search of the NOV19a protein against the Geneseq database, a proprietary database that contains sequences published in patents and patent publication, yielded several homologous proteins shown in Table 19D.

TABLE 19D
Geneseq Results for NOV19a

| | | NOV19a | Identities/ | |
|---|---|---|---|---|
| | | Residues/ | Similarities | |
| Geneseq | Protein/Organism/Length | Match | for the | Expect |
| Identifier | [Patent #, Date] | Residues | Matched Region | Value |
| AAE13147 | Human retinitis pigmentosa GTPase | 109 . . . 280 | 44/180 (24%) | 1e−04 |
| | regulator (RPGR) exon ORF15 - Homo | 248 . . . 427 | 70/180 (38%) | |
| | sapiens, 567 aa. [WO200177380-A2, | | | |
| | 18 OCT. 2001] | | | |
| AAE02397 | Canine retinitis pigmentosa GTPase | 68 . . . 280 | 53/218 (24%) | 5e−04 |
| | regulator (RPGR) protein - Canis | 254 . . . 437 | 80/218 (36%) | |
| | familiaris, 522 aa. [WO200138578-A1, | | | |
| | 31 MAY 2001] | | | |
| ABG04359 | Novel human diagnostic protein | 70 . . . 187 | 35/124 (28%) | 8e−04 |
| | #4350 - Homo sapiens, 508 aa. | 251 . . . 367 | 50/124 (40%) | |
| | [WO200175067-A2, 11 OCT. 2001] | | | |
| AAB23158 | Human colorectal cancer modulator | 33 . . . 201 | 49/196 (25%) | 0.007 |
| | protein, CAA9 - Homo sapiens, 1212 | 8 . . . 197 | 62/196 (31%) | |
| | aa. [WO200055633-A2, 21 SEP. 2000] | | | |
| ABG32328 | P. vivax circumsporozoite protein | 30 . . . 127 | 40/106 (37%) | 0.012 |
| | derived hypothetical protein - | 23 . . . 120 | 43/106 (39%) | |
| | Plasmodium vivax strain Belem, 144 | | | |
| | aa. [US6399062-B1, 04 JUN. 2002] | | | |

[0461] In a BLAST search of public sequence databases, the NOV19a protein was found to have homology to the proteins shown in the BLASTP data in Table 19E.

TABLE 19E
Public BLASTP Results for NOV19a

| | | NOV19a | Identities/ | |
|---|---|---|---|---|
| Protein | | Residues/ | Similarities | |
| Accession | | Match | for the | Expect |
| Number | Protein/Organism/Length | Residues | Matched Portion | Value |
| Q9GMD3 | X-linked retinitis pigmentosa GTPase | 70 . . . 280 | 55/218 (25%) | 2e−05 |
| | regulator - Bos taurus (Bovine), 934 | 498 . . . 707 | 78/218 (35%) | |
| | aa (fragment). | | | |
| Q918P0 | Latency associated antigen - Ovine | 74 . . . 286 | 59/226 (26%) | 5e−05 |
| | herpesvirus 2, 495 aa. | 140 . . . 334 | 79/226 (34%) | |
| Q9ET15 | Retinitis pigmentosa GTPase | 46 . . . 280 | 59/241 (24%) | 5e−05 |
| | regulator - Mus musculus (Mouse), | 141 . . . 377 | 94/241 (38%) | |
| | 538 aa (fragment). | | | |
| Q9HD28 | Retinitis pigmentosa GTPase | 109 . . . 280 | 44/180 (24%) | 4e−04 |
| | regulator - Homo sapiens (Human), | 248 . . . 427 | 70/180 (38%) | |
| | 567 aa (fragment). | | | |
| Q03871 | Glutenin, high molecular weight | 77 . . . 229 | 40/160 (25%) | 5e−04 |
| | subunit 1BY9 precursor - Triticum | 240 . . . 380 | 64/160 (40%) | |
| | aestivum (Wheat), 705 aa. | | | |

[0462] PFam analysis predicts that the NOV19a protein contains the domains shown in the Table 19F.

TABLE 19F
Domain Analysis of NOV19a

| | | | |
|---|---|---|---|
| Pfam Domain | NOV19a | Identities/Similarities | Expect |
| | Match Region | for the Matched Region | Value |

### Example 20.

[0463] The NOV20 clone was analyzed, and the nucleotide and encoded polypeptide sequences are shown in Table 20A.

TABLE 20A
NOV20 Sequence Analysis

| | SEQ ID NO:87 | 953 bp | |
|---|---|---|---|
| NOV20a, | CTCTGCCATGATCATTTTCAACCTGAGCAGTTACAATCCAGGACCCTTCATTCTGGTAGGGATCCC | | |
| CG55798-04 | | | |
| DNA Sequence | AGGCCTGGAGCAATTCCATGTGTGGATTGGAATTCCCTTCTGTATCATCTACATTGTAGCTGTTGT | | |
| | GGGAAACTGCATCCTTCTCTACCTCATTGTGGTGGAGCATAGTCTTCATGAACCCATGTTCTTCTT | | |
| | TCTCTCCATGCTGGCCATGACTGACCTCATCTTGTCCACAGCTGGTGTGCCTAAAACACTCAGTAT | | |
| | CTTTTGGCTAGGGGCTCGCCAAATCACATTCCCAGGATGCCTTACACAAATGTTCTTCCTTCACTA | | |
| | TAACTTTGTCCTGGATTCAGCCATTCTGATGGCCATGGCATTTGATCACTATGTAGCTATCTGTTC | | |
| | TCCCTTGAGATATACCACCATCTTGACTCCCAAGACCATCATCAAGAGTGCTATGGGCATCTCCTT | | |
| | TCGAAGCTTCTGCATCATCCTGCCAGATGTATTCTTGCTGACATGCCTGCCTTTCTGCAGGACACG | | |
| | CATCATACCCCACACATACTGTGAGCATATGGGTGTTCCCCAGCTCGCCTGTGCTGATATCTCCAT | | |
| | CAACTTCTGGTATGGCTTTTGTGTTCCCATCATGACAGTCATCTCAGATGTGATTCTCATTGCTGT | | |
| | TTCCTACGCACACATCCTCTGTGCTGTCTTTTGCCTTCCCTCCCAAGATGCCCGCCAGAAGGCCCT | | |
| | CGGCACTTGTGOTTCTCATGTCTGTGTCATCCTCATGTTTTATACACCTGCCTTTTTCTCCATCCT | | |
| | CGCCCATCGCTTTGGACACAATGTCTCTCGCACCTTCCACATCATGTTTGCCAATCTCTACATTGT | | |
| | TATCCCACCTCCACTCAACCCCATGGTTTACGGAGTGAAGACCAAGCAGATCAGAGATAAGGTTAT | | |
| | ACTTTTGTTTTCTAAGGGTACAGGATGAT | | |
| | ORF Start: ATG at 8 | | ORF Stop: TGA at 950 |
| | SEQ ID NO:88 | 314 aa | MW at 35193.8 kD |
| NOV20a, | MIIFNLSSYNPGPFILVGIPGLEQFHVWIGIPFCIIYIVAVVAGNCILLYLIVVEHSLHEPMFFFLS | | |
| CG55798-04 | | | |
| Protein Sequence | MLAMTDLILSTAGVPKTLSIFWLGAREITFPGCLTQMFFLHYNFVLDSAILMAMAFDHYVAICSPL | | |
| | RYTTILTPKTILLKSAMGISFRSFCIILPDVFLLTCLPFCRTRIIPHTYCEHMGVAQLACADISINF | | |
| | WYGFCVPIMTVISDVILIAVSYAHILCAVFCLPSQDARQKALGTCGSHVCVILMFYTPAFFSILAH | | |
| | RFGHNVSRTFHIMFANLYIVIPPALNPMVYGVKTKQIRDKVILLFSKGTG | | |
| | SEQ ID NO:89 | 938 bp | |
| NOV20b, | TAAATGATGGACAACCACTCTAGTGCCACTGAATTCCACCTTCTAGGCTTCCCTGGGTCCCAAGGA | | |
| CG55798-02 | | | |
| DNA Sequence | CTACACCACATTCTTTTTCCTATATTCTTTTTCTTCTATTTAGTGACATTAATGGGAAACACGGTC | | |
| | ATCATTGTGATTGTCTGTGTGGATAAACGTCTGCAGTCCCCCATGTATTTCTTCCTCACCCACCTC | | |
| | TCTACCCTGGAGATCCTCGTCACAACCATAATTGTCCCCATGATGCTTTGGGGATTGCTCTTCCTG | | |
| | GGATGCAGACAGTATCTTTCTCTACATGTATCCCTCAACTTTTCCTGTGGGACCATGGAGTTTGCA | | |
| | TTACTTGGAGTGATGGCTGTGGACCGTTATGTGGCTGTGTGTAACCCTTTGAGGTACAACATCATT | | |
| | ATGAACAGCAGTACCTGTATTTGGGTGGTAATAGTGTCATGGGTGTTTCGATTTCTTTCTGAAATC | | |
| | TGGCCCATCTATGCCACATTTCAOTTTACCTTCCGCAAATCAAATTCATTAGACCATTTTTACTGT | | |
| | GACCGACGCCAATTGCTCAAACTGTCCTGCCATAACACTCTTCTCACAGAGTTTATCCTTTTCTTA | | |
| | ATGGCTGTTTTTATTCTCATTGGTTCTTTGATCCCTACGATTGTCTCCTACACCTACATTATCTCC | | |
| | ACCATCCTCAAGATCCCGTCAGCCTCTGGCCGGAGGAAAGCCTTCTCCACTTTTGCCTCCCACTTC | | |
| | ACCTGTGTTGTGATTGGCTATCGCAGCTGCTTGTTTCTCTACGTGAAACCCAAGCAAACACACCGA | | |
| | GTTGAGTACAATAAGATAGTTTCCCTGTTGGTTTCTGTGTTAACCCCCTTCCTGAATCCTTTCATC | | |
| | TTTACTCTTCGGAATGACAAAGTCAAAGAGGCCCTCCGAGATGGGATGAAACGCTGCTGTCAACTC | | |
| | CTGAAAGATTAGCT | | |
| | ORF Start: ATG at 4 | | ORF Stop: TAG at 934 |
| | SEQ ID NO:90 | 310 aa | MW at 35329.6 kD |
| NOV20b, | MMDNHSSATEFHLLGFPGSQGLHHILFAIFFFFYLVTLMGNTVIIVIVCVDKRLQSPMYFFLSHLS | | |
| CG55798-02 | | | |
| Protein Sequence | TLEILVTTIIVPMMLWGLLFLGCRQYLSLHVSLNFSCCTMEFALLGVMAVDRYVAVCNPLRYWIIM | | |
| | NSSTCIWVVIVSWVFGFLSEIWPIYATFQFTFRKSNSLDHFYCDRGOLLKLSCUNTLLTEFILFLM | | |
| | AVFILIGSLIPTIVSYTYIISTILKIPSASGRRKAFSTFASHFTCVVIGYGSCLFLYVKPKQTQGV | | |
| | EYNKIVSLLVSVLTPFLNPFIFTLRNDKVKEALRDGMKRCCQLLKD | | |
| | SEQ ID NO:91 | 952 bp | |
| NOV20c, | CACCGGATCCACCAATGAGGACAACCACTCTAGTGCCACTGAATTCCACCTTCTAGGCTTCCCTGG | | |
| 265722099 DNA | | | |
| Sequence | GTCCCAAGOACTACACCACATTCTTTTTGCTATATTCTTTTTCTTCTATTTAGTGACATTAATGGG | | |
| | AAACACGGTCATCATTGTGATTGTCTGTGTGGATAAACGTCTGCAGTCCCCCATGTATTTCTTCCT | | |
| | CAGCCACCTCTCTACCCTGGAGATCCTGGTCACAACCATAATTGTCCCCATGATGCTTTGGGGATT | | |
| | GCTCTTCCTGGGATGCAGACAGTATCTTTCTCTACATGTATCGCTCAACTTTTCCTGTCGGACCAT | | |
| | GGAGTTTGCATTACTTGGAGTGATGGCTGTGGACCGTTATGTGGCTGTGTGTAACCCTTTGAGGTA | | |
| | CAACATCATTATGAACAGCAGTACCTGTATTTGGGTGGTAATAGTGTCATGGGTGTTTGGATTTCT | | |
| | TTCTGAAATCTGGCCCATCTATGCCACATTTCAGTTTACCTTCCGCAAATCAAATTCATTAGACCA | | |
| | TTTTTACTGTGACCGAGGGCAATTGCTCAAACTGTCCTGCGATAACACTCTTCTCACAGAGTTTAT | | |
| | CCTTTTCTTAATGGCTGTTTTTATTCTCATTGGTTCTTTGATCCCTACGATTGTCTCCTACACCTA | | |
| | CATTATCTCCACCATCCTCAAGATCCCGTCAGCCTCTGGCCGCAGGAAAGCCTTCTCCACTTTTGC | | |
| | CTCCCACTTCACCTGTGTTGTGATTGGCTATGGCAGCTGCTTGTTTCTCTACGTGAAACCCAAGCA | | |
| | AACACAGGGAGTTCAGTACAATAAGATAGTTTCCCTGTTGGTTTCTGTGTTAACCCCCTTCCTGAA | | |
| | TCCTTTCATCTTTACTCTTCGGAATGACAAAGTCAAAGAGGCCCTCCGAGATGGGATGAAACGCTG | | |
| | CTGTCAACTCCTGAAAGATCTCGAGGGC | | |
| | ORF Start: at 2 | | ORF Stop: end of sequence |
| | SEQ ID NO:92 | 317 aa | MW at 35956.1 kD |
| NOV20c, | TGSTNEDNHSSATEFHLLGFPGSQGLHHILFAIFFFFYLVTLMGNTVIIVIVCVDKRLQSPMYFFL | | |
| 265722099 | | | |
| Protein Sequence | SHLSTLEILVTTIIVPMMLWGLLFLGCRQYLSLHVSLNFSCGTMEFALLGVMAVDRYVAVCNPLRY | | |
| | NIIMNSSTCIWVVIVSWVFGFLSEIWPIYATFQFTFRKSNSLDHFYCDRGQLLKLSCDNTLLTEFI | | |
| | LFLMAVFILIGSLIPTIVSYTYIISTILKIPSASGRRKAFSTFASHFTCVVIGYGSCLFLYVKPKQ | | |
| | TQGVEYNKIVSLLVSVLTPFLNPFIFTLRNDKVKEALRDGMKRCCQLLKDLEG | | |
| | SEQ ID NO:93 | 829 bp | |
| NOV20d, | CACCGGATCCAACACGGTCATCATTGTGATTGTCTGTGTGGATAAACGTCTGCAGTCCCCCATGTA | | |
| 265725302 DNA | | | |
| Sequence | TTTCTTCCTCAGCCACCTCTCTACCCTGGAGATCCTGGTCACAACCATAATTGTCCCCATGATGCT | | |
| | TTGGGGATTGCTCTTCCTGGGATGCAGACAGTATCTTTCTCTACATGTATCGCTCAACTTTTCCTG | | |
| | TGGGACCATGGAGTTTGCATTACTTGGAGTGATGGCTGTGGACCGTTATGTGGCTGTGTGTAACCC | | |
| | TTTGAGGTACAACATCATTATGAACACCACTACCTGTATTTGGGTGGTAATAGTGTCATGGGTGTT | | |
| | TGGATTTCTTTCTGAAATCTGGCCCATCTATGCCACATTTCAGTTTACCTTCCGCAAATCAAATTC | | |
| | ATTAGACCATTTTTACTGTGACCGAGGOCAATTGCTCAAACTGTCCTGCGATAACACTCTTCTCAC | | |
| | AGAGTTTATCCTTTTCTTAATGGCTGTTTTTATTCTCATTGGTTCTTTGATCCCTACGATTGTCTC | | |
| | CTACACCTACATTATCTCCACCATCCTCAAGATCCCGTCAGCCTCTGGCCGGAGGAAAGCCTTCTC | | |
| | CACTTTTGCCTCCCACTTCACCTGTGTTGTGATTGGCTATCGCACCTGCTTGTTTCTCTACGTGAA | | |
| | ACCCAAGCAAACACAGGGAGTTGAGTACAATAAGATAGTTTCCCTGTTGGTTTCTGTGTTAACCCC | | |
| | CTTCCTGAATCCTTTCATCTTTACTCTTCGGAATGACAAAGTCAAAGAGGCCCTCCGAGATGGGAT | | |
| | GAAACGCTGCTGTCAACTCCTGAAAGATCTCGAGGGC | | |
| | ORF Start: at 2 | | ORF Stop: end of sequence |
| | SEQ ID NO:94 | 276 aa | MW at 31316.9 kD |
| NOV20d, | TGSNTVIIVIVCVDKRLQSPMYFFLSHLSTLEILVTTIIVPMMLWGLLFLGCRQYLSLNVSLNFSC | | |
| 265725302 | | | |
| Protein Sequence | GTMEFALLGVMAVDRYVAVCNPLRYNIIMNSSTCIWVVIVSWVFGFLSEIWPIYATFQFTFRKSNS | | |
| | LDHFYCDRGQLLKLSCDNTLLTEFILFLMAVFILIGSLIPTIVSYTYIISTILKIPSASGRRKAFS | | |
| | TFASHFTCVVTQYGSCLFLYVKPKQTQGVEYNKIVSLLVSVLTPFLNPFIFTLRNDKVKEALRDGM | | |
| | KRCCQLLKDLEG | | |
| | SEQ ID NO:95 | 953 bp | |
| NOV20e, | CTCTGCCATGATCATTTTCAACCTGAGCAGTTACAATCCAGGACCCTTCATTCTGGTAGGGATCCC | | |
| CG55798-01 | | | |
| DNA Sequence | AGCCCTGGAGCAATTCCATGTGTGGATTGGAATTCCCTTCTGTATCATCTACATTGTAGCTGTTGT | | |
| | GGGAAACTGCATCCTTCTCTACCTCATTGTGGTGGAGCATAGTCTTCATGAACCCATCTTCTTCTT | | |
| | TCTCTCCATGCTGCCCATCACTGACCTCATCTTGTCCACACCTGGTGTGCCTAAAACACTCAGTAT | | |
| | CTTTTGGCTAGGGGCTCGCGAAATCACATTCCCAGGATGCCTTACACAAATGTTCTTCCTTCACTA | | |
| | TAACTTTGTCCTGGATTCAGCCATTCTGATGGCCATGGCATTTCATCGCTATGTACCTATCTGTTC | | |
| | TCCCTTGAGATATACCACCATCTTGACTCCCAAGACCATCATCAAGAGTGCTATGCGCATCTCCTT | | |
| | TCGAAGCTTCTGCATCATCCTGCCACATGTATTCTTGCTOACATGCCTGCCTTTCTGCACGACACG | | |
| | CATCATACCCCACACATACTGTGAGCATATAGGTGTTGCCCAGCTCGCCTGTCCTGATATCTCCAT | | |
| | CAACTTCTGGTATGGCTTTTGTGTTCCCATCATGACAGTCATCTCAGATGTGATTCTCATTGCTGT | | |
| | TTCCTACCCACACATCCTCTGTGCTGTCTTTTGCCTTCCCTCCCAAGATGCCCGCCACAAAGCCCT | | |
| | CGCCCATCGCTTTGGACACAATGTCTCTCGCACCTTCCACATCATGTTTGCCAATCTCTACATTGT | | |
| | CGCCCATCGCTTTGGACACAATGTCTCTCGCACCTTCCACATCATGTTTGCCAATCTCTACATTGT | | |
| | TATCCCACCTGCACTCAACCCCATGGTTTACGCAGTGAACACCAAGCAGATCAGACATAAGGTTAT | | |
| | ACTTTTGTTTTCTAAGGGTACAGGATGAT | | |
| | ORF Start: ATG at 8 | | ORF Stop: TGA at 950 |
| | SEQ ID NO:96 | 314 aa | MW at 35194.8 kD |
| NOV20e, | MIIFNLSSYNPGPFILVGIPGLEQFHVWIGIPFCIIYIVAVVGNCILLYLIVVEHSLHEPMFFFLS | | |
| CG55798-01 | | | |
| Protein Sequence | MLAMTDLILSTAGVPKTLSIFWLGAREITFPGCLTQMFFLHYNFVLDSAILMAMAFDRYVAICSPL | | |
| | RYTTILTPKTIIKSAMGISFRSFCIILPDVFLLTCLPFCRTRIIPHTYCEHIGVAQLACADISINF | | |
| | WYGFCVPIMTVISDVILIAVSYAHILCAVFCLPSQDARQKALGTCGSHVCVILMFYTPAFFSILAH | | |
| | RFGHNVSRTFHIMFANLYIVIPPALNPMVYGVKTKQIRDKVILLFSKGTG | | |
| | SEQ ID NO:97 | 953 bp | |
| NOV20f, | CTCTGCCATGATCATTTTCAACCTGAGCAGTTACAATCCAGGACCCTTCATTCTCGTAGGGATCCC | | |
| CG55798-03 | | | |
| DNA Sequence | AGGCCTGGAGCAATTCCATGTGTGGATTGOAATTCCCTTCTGTATCATCTACATTGTAGCTGTTGT | | |
| | GCGAAACTGCATCCTTCTCTACCTCATTOTGGTGGAGCATAGTCTTCATGAACCCATGTTCTTCTT | | |
| | TCTCTCCATGCTGCCCATGACTGACCTCATCTTGTCCACAGCTGGTGTGCCTAAAACACTCAGTAT | | |
| | CTTTTGGCTAGOGGCTCGCGAAATCACATTCCCAGGATGCCTTACACAAATGTTCTTCCTTCACTA | | |
| | TAACTTTGTCCTCGATTCAGCCATTCTGATGGCCATGGCATTTGATCGCTATGTAGCTATCTGTTC | | |
| | TCCCTTGAGATATACCACCATCTTGACTCCCAAGACCATCATCAAGAGTGCTATGGGCATCTCCTT | | |
| | TCGAAGCTTCTGCATCATCCTGCCAGATGTATTCTTGCTGACATCCCTGCCTTTCTGCAGGACACG | | |
| | CATCATACCCCACACATACTGTGAGCATATAGGTGTTGCCCGGCTCGCCTGTGCTGATATCTCCAT | | |
| | CAACTTCTGGTATGGCTTTTGTGTTCCCATCATGACAGTCATCTCAGATGTGATTCTCATTGCTGT | | |
| | TTCCTACGCACACATCCTCTGTGCTGTCTTTTGCCTTCCCTCCCAAGATGCCCGCCAGAAAGCCCT | | |
| | CCGCACTTGTGOTTCTCATGTCTGTGTCATCCTCATGTTTTATACACCTGCCTTTTTCTCCATCCT | | |
| | CGCCCATCGCTTTCGACACAATGTCTCTCCCACCTTCCACATCATGTTTGCCAATCTCTACATTGT | | |
| | TATCCCACCTGCACTCAACCCCATGGTTTACGGAGTGAAGACCAAGCAGATCAGAGATAAGGTTAT | | |
| | ACTTTTGTTTTCTAAGGGTACAGGATGAT | | |
| | ORF Start: ATG at 8 | | ORF Stop: TGA at 950 |
| | SEQ ID NO:98 | 314 aa | MW at 35222.9 kD |

| | |
|---|---|
| NOV20f, | MIIFNLSSYNPGPFILVGIPGLEQFHVWIGIPFCIIYIVAVVGNCILLYLIVVEHSLHEPMFFFLS |
| CG55798-03 | |
| Protein Sequence | MLAMTDLILSTAGVPKTLSIFWLGAREITFPGCLTQMFFLHYNFVLDSAILMAMAFDRYVAICSPL |
| | RYTTILTPKTIIKSAMGISFRSFCIILPDVFLLTCLPFCRTRIIPHTYCEHIGVARLACADISINF |
| | WYGFCVPIMTVISDVILIAVSYAHILCAVFCLPSQDARQKALGTCGSHVCVILMFYTPAFFSILAH |
| | RFGHNVSRTFHIMFANLYIVIPPALNPMVYGVKTKQIRDKVILLFSKGTG |

[0464] Sequence comparison of the above protein sequences yields the following sequence relationships shown in Table 20B.

TABLE 20B
Comparison of NOV20a against NOV20b through NOV20f

| | | Identities/ |
|---|---|---|
| | | Similarities for |
| Protein | NOV20a Residues/ | the Matched |
| Sequence | Match Residues | Region |
| NOV20b | 14 . . . 303 | 78/295 (26%) |
| | 11 . . . 295 | 146/295 (49%) |
| NOV20c | 14 . . . 303 | 78/295 (26%) |
| | 15 . . . 299 | 146/295 (49%) |
| NOV20d | 44 . . . 303 | 66/262 (25%) |
| | 4 . . . 258 | 133/262 (50%) |
| NOV20e | 1 . . . 314 | 312/314 (99%) |
| | 1 . . . 314 | 313/314 (99%) |
| NOV20f | 1 . . . 314 | 311/314 (99%) |
| | 1 . . . 314 | 313/314 (99%) |

[0465] Further analysis of the NOV20a protein yielded the following properties shown in Table 20C.

TABLE 20C
Protein Sequence Properties NOV20a

| SignalP | Cleavage site between residues 44 and 45 | | | | |
|---|---|---|---|---|---|
| analysis: | | | | | |
| PSORT II | PSG: a new signal peptide prediction method | | | | |
| analysis: | N-region: length 0; pos. chg 0; neg. chg 0 | | | | |
| | H-region: length 22; peak value 8.96 | | | | |
| | PSG score: 4.56 | | | | |
| | GvH: von Heijne's method for signal seq. recognition | | | | |
| | GvH score (threshold: −2.1): −7.41 | | | | |
| | possible cleavage site: between 47 and 48 | | | | |
| | >>> Seems to have no N-terminal signal peptide | | | | |
| | ALOM: Klein et al's method for TM region allocation | | | | |
| | Init position for calculation: 1 | | | | |
| | Tentative number of TMS(s) for the threshold 0.5: 6 | | | | |
| | INTEGRAL | Likelihood = | −9.24 | Transmembrane | 35-51 |
| | INTEGRAL | Likelihood = | −1.17 | Transmembrane | 61-77 |
| | INTEGRAL | Likelihood = | −5.31 | Transmembrane | 155-171 |
| | INTEGRAL | Likelihood = | −0.16 | Transmembrane | 194-210 |
| | INTEGRAL | Likelihood = | −7.80 | Transmembrane | 213-229 |
| | INTEGRAL | Likelihood = | −5.36 | Transmembrane | 247-263 |
| | PERIPHERAL | Likelihood = | 1.06 (at 116) | | |
| | ALOM score: −9.24 (number of TMSs: 6) | | | | |
| | MTOP: Prediction of membrane topology (Hartmann et al.) | | | | |
| | Center position for calculation: 42 | | | | |
| | Charge difference: −0.5 C(−1.0)-N(−0.5) | | | | |
| | N >= C: N-terminal side will be inside | | | | |
| | >>> membrane topology: type 3a | | | | |
| | MITDISC: discrimination of mitochondrial targeting seq | | | | |
| | R content: | 0 | Hyd Moment(75): | 4.03 | |
| | Hyd Moment(95): | 2.58 | G content: | 3 | |
| | D/E content: | 1 | S/T content: | 2 | |

Score: −6.52
Gavel: prediction of cleavage sites for mitochondrial preseq
cleavage site motif not found
NUCDISC: discrimination of nuclear localization signals
pat4: none
pat7: none
bipartite: none
content of basic residues: 5.4%
NLS Score: −0.47
KDEL: ER retention motif in the C-terminus: none
ER Membrane Retention Signals:
KKXX-like motif in the C-terminus: SKGT
SKL: peroxisomal targeting signal in the C-terminus: none
PTS2: 2nd peroxisomal targeting signal: none
VAC: possible vacuolar targeting motif: none
RNA-binding motif: none
Actinin-type actin-binding motif:
type 1: none
type 2: none
NMYR: N-myristoylation pattern: none
Prenylation motif: none
memYQRL: transport motif from cell surface to Golgi: none
Tyrosines in the tail: none
Dileucine motif in the tail: none
checking 63 PROSITE DNA binding motifs: none
checking 71 PROSITE ribosomal protein motifs: none
checking 33 PROSITE prokaryotic DNA binding motifs: none
NNCN: Reinhardt's method for Cytoplasmic/Nuclear
discrimination
Prediction: cytoplasmic
Reliability: 94.1
COIL: Lupas's algorithm to detect coiled-coil regions
total: 0 residues
Final Results (k = 9/23):
55.6%: endoplasmic reticulum
22.2%: mitochondrial
11.1%; nuclear
11.1%: vesicles of secretory system
>> prediction for CG55798-04 is end (k = 9)

[0466] A search of the NOV20a protein against the Geneseq database, a proprietary database that contains sequences published in patents and patent publication, yielded several homologous proteins shown in Table 20D.

TABLE 20D
Geneseq Results for NOV20a

| | | | Identities/ | |
|---|---|---|---|---|
| | | | Similarities for | |
| Geneseq | Protein/Organism/Length | NOV20a Residues/ | the Matched | Expect |
| Identifier | [Patent #, Date] | Match Residues | Region | Value |
| ABJ04720 | GPCR 1 protein SEQ ID No 6 - | 1 . . . 314 | 314/314 (100%) | 0.0 |
| | Unidentified, 314 aa. | 1 . . . 314 | 314/314 (100%) | |
| | [WO200246229-A2, 13 JUN. 2002] | | | |
| ABJ04718 | GPCR 1 protein SEQ ID No 2 - | 1 . . . 314 | 312/314 (99%) | 0.0 |
| | Unidentified, 316 aa. | 3 . . . 316 | 313/314 (99%) | |
| | [WO200246229-A2, 13 JUN. 2002] | | | |
| ABJ04719 | GPCR 1 protein SEQ ID No 4 - | 1 . . . 314 | 311/314 (99%) | 0.0 |
| | Unidentified, 314 aa. | 1 . . . 314 | 313/314 (99%) | |
| | [WO200246229-A2, 13 JUN. 2002] | | | |
| ABJ03990 | Human G-protein coupled receptor | 1 . . . 314 | 310/314 (98%) | 0.0 |
| | SEQ ID NO: 46 - Homo sapiens, 320 | 7 . . . 320 | 311/314 (98%) | |
| | aa. [WO200255558-A2, | | | |
| | 18 JUL. 2002] | | | |
| AAU85271 | G-coupled olfactory receptor #132 - | 1 . . . 314 | 310/314 (98%) | 0.0 |
| | Homo sapiens, 320 aa. | 7 . . . 320 | 311/314 (98%) | |
| | [WO200198526-A2, 27 DEC. 2001] | | | |

[0467] In a BLAST search of public sequence databases, the NOV20a protein was found to have homology to the proteins shown in the BLASTP data in Table 20E.

TABLE 20E
Public BLASTP Results for NOV20a

| | | | Identities/ | |
|---|---|---|---|---|
| Protein | | | Similarities for | |
| Accession | | NOV20a Residues/ | the Matched | Expect |
| Number | Protein/Organism/Length | Match Residues | Portion | Value |
| CAD37688 | Sequence 411 from Patent | 1 . . . 314 | 310/314 (98%) | 0.0 |
| | WO0224726 - Homo sapiens | 1 . . . 314 | 311/314 (98%) | |
| | (Human), 314 aa. | | | |
| Q8NGJ2 | Seven transmembrane helix | 1 . . . 314 | 310/314 (98%) | 0.0 |
| | receptor - Homo sapiens (Human), | 7 . . . 320 | 311/314 (98%) | |
| | 320 aa. | | | |
| Q8VG19 | Olfactory receptor MOR31-12 - | 1 . . . 310 | 279/310 (90%) | e-165 |
| | Mus musculus (Mouse), 316 aa. | 1 . . . 310 | 294/310 (94%) | |
| Q8VGW1 | Olfactory receptor MOR31-7 - Mus | 1 . . . 308 | 253/308 (82%) | e-151 |
| | musculus (Mouse), 312 aa. | 1 . . . 308 | 277/308 (89%) | |
| Q8VG78 | Olfactory receptor MOR31-11 - | 3 . . . 310 | 234/308 (75%) | e-138 |
| | Mus musculus (Mouse), 313 aa. | 1 . . . 308 | 265/308 (85%) | |

[0468] PFam analysis predicts that the NOV20a protein contains the domains shown in the Table 20F.

TABLE 20F
Domain Analysis of NOV20a

| | | Identities/ | |
|---|---|---|---|
| | | Similarities for | |
| Pfam | NOV20a Match | the Matched | Expect |
| Domain | Region | Region | Value |
| 7tm_1 | 43 . . . 294 | 49/269 (18%) | 5e-15 |
| | | 165/269 (61%) | |

### Example 21.

[0469] The NOV21 clone was analyzed, and the nucleotide and encoded polypeptide sequences are shown in Table 21A.

TABLE 21A
NOV21 Sequence Analysis

| | SEQ ID NO:99 | 1217 bp | |
|---|---|---|---|
| NOV21a, | GGCCCCTGGGATCCATGCTGGCCCGGAGGAAGCCGGTGCTGCCGGCGCTCACCATCAACCCTACCA | | |
| CG55838-05 | | | |
| DNA Sequence | TCGCCGAGGGCCCATCCCCTACCAGCGAGGGCGCCTCCGAGGCAAACCTGGTGGACCTGCAGAAGA | | |
| | AGCTGGAGGAGCTGGAACTTGACGAGCAGCAGAAGAAGCGCCTGGAAGCCTTTCTCACCCAGAAAG | | |
| | CCAAGGTCGGCGAACTCAAAGACGATGACTTCCAAACGATCTCAGAGCTGGGCGCGGGCAACGGCG | | |
| | GGGTGGTCACCAAAGTCCAGCACAGACCCTCGGGCCTCATCATGGCCAGGAAGCTGATCCACCTTG | | |
| | AGATCAAGCCGGCCATCCGGAACCAGATCATCCGCGAGCTGCAGGTCCTGCACGAATGCAACTCGC | | |
| | CGTACATCGTGCGCTTCTACGGGGCCTTCTACAGTGACGGCGAGATCAGCATTTGCATGCAACACA | | |
| | TGGACGGCGGCTCCCTGGACCAGGTGCTCAAAGAGGCCAAGAGGATTCCCGAGGAGATCCTGAAGA | | |
| | AAGTCAGCATCGCGGTTCTCCGGGGCTTGGCGTACCTCCGAGAGAAGCACCAGATCATGCACCGAG | | |
| | ATGTGAAGCCCTCCAACATCCTCGTGAACTCTAGAGGGGAGATCAAGCTGTGTGACTTCGGGGTGA | | |
| | GCGGCCAGCTCATAGACTCCATGGCCAACTCCTTCGTCGGCACGCGCTCCTACATAACTCCGGAGC | | |
| | GGTTGCAGGGCACACATTACTCGGTGCAGTCCGACATCTGGAGCATGGGCTTGTCCCTGGTGGAGC | | |
| | TGGCCGTCCGAAGGTACCCCATCCCCCCGCCCGACGCCAAAGAGCTGGAGGCCATCTTTGGCCGGC | | |
| | CCGTGGTCGACGGGGAAGAAGGAGAGCCTCACAGCATCTCGCCTCGGCCGAGGCCCCCCGAACGCC | | |
| | CCGTCAGCGGTCACGCGATGGATAGCCGGCCTGCCATGGCCATCTTTGAACTCCTGGACTATATTG | | |
| | TGAACGAGCCACCTCCTAAGCTGCCCAACGGTGTGTTCACCCCCGACTTCCAGGAGTTTGTCAATA | | |
| | AATGCCTCATCAAGAACCCAGCGGAGCGGGCGGACCTGAAGATGCTCACAAACCACACCTTCATCA | | |
| | AGCCGTCCGAGGTGGAAGAAGTGGATTTTGCCGGCTGGTTGTGTAAAACCCTGCGGCTGAACCAGC | | |
| | CCGGCACACCCACGCGCACCGCCGTGTGA | | |
| | ORF Start: at 3 | | ORF Stop: TGA at 1215 |
| | SEQ ID NO:100 | 404 aa | MW at 4477.0 kD |
| NOV21 a, | PLGSMLARRKPVLPALTINPTIAEGPSPTSEGASEANLVDLOKKLEELELDEQQKKRLEAFLTQKA | | |
| CG55838-05 | | | |
| Protein Sequence | KVGELKDDDFERISELGAGNGGVVTKVQHRPSGLIMARKLIHLEIKPAIRNQIIRELQVLHECNSP | | |
| | YIVGFYGAFYSDGEISICMEHMDCGSLDQVLKEAKRIPEEILGKVSIAVLRGLAYLREKHQIMHRD | | |
| | VKPSNILVNSRGEIKLCDFGVSGQLIDSMANSFVGTRSYMAPERLQGTHYSVQSDIWSMGLSLVEL | | |
| | AVGRYPIPPPDAKELEAIFGRPVVDGEEGEPHSISPRPRPPGRPVSGHGMDSRPAMAIFELLDYIV | | |
| | NEPPPKLPNGVFTPDFQEFVNKCLIKNPAERADLKMLTNHTFIKRSEVEEVDFAGWLCKTLRLNQP | | |
| | GTPTRTAV | | |
| | SEQ ID NO:101 | 948 bp | |
| NOV21b, | CACCGGATCCACCATGCTGGCCCGGAGGAAGCCCGTGCTGCCGGCGCTCACCATCAACCCTACCAT | | |
| CG55838-05 | | | |
| DNA Sequence | CGCCGAGGGCCCATCCCCTACCAGCGAGGGCGCCTCCGAGGCAAACCTGGTGGACCTGCAGAAGAA | | |
| | GCTGGAGGAGCTGGAACTTGACGAGCAGCAGAAGAAGCGGCTGGAAGCCTTTCTCACCCAGAAAGC | | |
| | CAAGGTTGGCGAACTCAAACACGATGACTTCGAAAGGATCTCAGAGCTGGGCGCGGGCAACGGCGG | | |
| | GGTGGTCACCAAAGTCCAGCACACACCCTCGGGCCTCATCATGGCCAGOAAGCTGATCCACCTTGA | | |
| | GATCAAGCCGGCCATCCGGAACCAGATCATCCGCGAGCTGCAGGTCCTQCACGAATGCAACTCGCC | | |
| | GTACATCGTGGGCTTCTACGGGGCCTTCTACAGTGACGGGGAGATCAGCATTTGCATGGAACACAT | | |
| | GGACGGCGGCTCCCTGGACCAGGTGCTOAAAGAGGCCAAGAGGATTCCCGAGGAGATCCTGGGGAA | | |
| | AGTCAOCATCGCGGTTCTCCGGGGCTTGGCGTACCTCCGAGAGAAGCACCAGATCATCCACCGAGA | | |
| | TCTGAAGCCCTCCAACATCCTCGTGAACTCTAGAGGGGAGATCAACCTGTGTGACTTCGGGGTGAG | | |
| | CGGCCAGCTCATCGACTCCATGGCCAACTCCTTCGTGGCCACGCGCTCCTACATGGCTCCACCTCC | | |
| | TAAGCTGCCCAACGGTGTGTTCACCCCCCACTTCCAGGAGTTTGTCAATAAATGCCTCATCAAGAA | | |
| | CCCAGCGGAGCGGGCGGACCTGAAGATGCTCACAAACCACACCTTCATCAAGCGGTCCGAGGTGGA | | |
| | AGAAGTGGATTTTGCCGGCTGGTTGTGTAAAACCCTGCGGCTGAACCAGCCCGGCACACCCACGCG | | |
| | CACCGCCGTGTGAGCGGCCGCTAT | | |
| | ORF Start: at 2 | | ORF Stop: TGA at 935 |
| | SEQ ID NO:102 | 311 aa | MW at 34571.5 kD |
| NOV21b, | TGSTMLARRKPVLPALTINPTIAEGPSPTSEGASEANLVDLQKKLEELELDEQQKKRLEAFLTQKA | | |
| CG55838-03 | | | |
| Protein Sequence | KVGELKDDDFERISELGAGNGGVVTKVQHRPSGLIMARKLIHLEIKPAIRNQIIRELQVLHECNSP | | |
| | YIVGFYGAFYSDGEISICMEHMDGGSLDQVLKEAKRIPEEILGKVSIAVLRGLAYLREKHQIMHRD | | |
| | VKPSNILVNSRGEIKLCDFGVSGQLIDSMANSFVGTRSYMAPPPKLPNGVFTPDFQEFVNKCLIKN | | |
| | PAERADLKMLTNHTFIKRSEVEEVDFAGWLCKTLRLNQPGTPTRTAV | | |
| | SEQ ID NO:103 | 1504 bp | |
| NOV21c, | CCGGCCCGCGAGCCCCGATGCTGGCCCGGAGGAAGCCCGTGCTGCCGGCGCTCACCATCAACCCT | | |
| CG55838-02 | | | |
| DNA Sequence | ACCATCGCCGAGGCCCCATCCCCTACCAGCGAGGGCGCCTCCGAGGCAAACCTGGTGGACCTGCAG | | |
| | AAGAAGCTGGAGGAGCTGGAACTTGACGAGCAGCAGAAGAAGCGGCTGGAAGCCTTTCTCACCCAG | | |
| | AAAGCCAAGGTCGGCGAACTCAAAGACGATGACTTCGAAAGGATCTCAGAGCTGGGCGCGGGCAAC | | |
| | GGCGGGGTGGTCACCAAAGTCCAGCACAGACCCTCGGGCCTCATCATGGCCAGGAAGCTGATCCAC | | |
| | CTTGAGATCAAGCCGGCCATCCGGAACCAGATCATCCGCGAGCTGCAGGTCCTGCACGAATGCAAC | | |
| | TCGCCGTACATCGTGGGCTTCTACGGGGCCTTCTACAGTGACGGGGAGATCAGCATTTGCATCGAA | | |
| | CACATGGACGGCGGCTCCCTGGACCATCTCCTGAAAGAGGCCAAGAGGATTCCCGAGGAGATCCTG | | |
| | GCGAAAGTCAGCATCGCGGTTCTCCGGGGCTTGGCGTACCTCCGAGAGAAGCACCAGATCATGCAC | | |
| | CGAGATGTGAAGCCCTCCAACATCCTCGTGAACTCTAGAGGGGAGATCAAGCTGTGTGACTTCGGG | | |
| | GTGAGCGGCCAGCTCATCGACTCCATGGCCAACTCCTTCGTCGGCACGCGCTCCTACATGGCTCCG | | |
| | GAGCGGTTGCAGGGCACACATTACTCGGTGCAGTCGGACATCTGGAGCATGGGCCTGTCCCTGGTG | | |
| | GAGCTGGCCGTCGGAAGGTACCCCATCCCCCCGCCCGACGCCAAAGAGCTGGAGGCCATCTTTGGC | | |
| | CGGCCCGTGGTCGACGGGGAAGAAGGAGAGCCTCACAGCATCTCGCCTCGGCCGAGGCCCCCCGGG | | |
| | CGCCCCGTCAGCGGTCACGGGATGGATAGCCGGCCTGCCATGGCCATCTTTGAACTCCTGGACTAT | | |
| | ATTGTGAACGAGCCACCTCCTAAGCTGCCCAACGGTGTGTTCACCCCCGACTTCCAGGAGTTTGTC | | |
| | AATAAATGCCTCATCAAGAACCCAGCGGAGCGGGCGGACCTGAAGATGCTCACAAACCACACCTTC | | |
| | ATCAACCGGTCCGAGGTGGAAGAAGTGGATTTTGCCGGCTGGTTGTGTAAAACCCTGCGGCTGAAC | | |
| | CAGCCCGGCACACCCACGCGCACCGCCGTGTGACAGTGGCCGGGCTCCCTGCGTCCCGCTGGTGAC | | |
| | CTGCCCACCGTCCCTGTCCATGCCCCGCCCTTCCAGCTGAGCACAGGCTGGCGCCTCCACCCACCC | | |
| | TCCTGCCTCACCCCTGCGGAGAGCACCGTGGCGGGGCGACAGCGCATGCAGGAACGGGGGTCTCCT | | |
| | CTCCTGCCCGTCCTGGCCGGGGTGCCTCTGGGGACGGGCGACGCTGCTGTGTGTOGTCTCAGAGGC | | |
| | TCTGCTTCCTTAGGTTACAAAACAAAACAGGGAGAGAAAAAGCAAAAAAAAA | | |
| | ORF Start: ATG at 19 | | ORF Stop: TGA at 1219 |
| | SEQ ID NO:104 | 400 aa | MW at 44446.7 kD |
| NOV21 c, | MLARRKPVLPALTINPTIAEGPSPTSEGASEANLVDLQKKLEELELDEQQKKRLEAFLTQKAKVGE | | |
| CG55838-02 | | | |
| Protein Sequence | LKDDDFERISELGAGNGGVVTKVQHRPSGLIMARKLIHLEIKPAIRNQIIRELQVLHECNSPYIVG | | |
| | FYGAFYSDGEISICMEHMDGGSLDHLLKEAKRIPEEILGKVSIAVLRGLAYLREKHQIMHRDVKPS | | |
| | NILVNSRGEIKLCDFGVSGQLIDSMANSFVGTRSYMAPERLQGTHYSVOSDIWSMGLSLVELAVGR | | |
| | YPIPPPDAKELEAIFGRPVVDGEEGEPHSISPRPRPPGRPVSGHGMDSRPAMAIFELLDYIVNEPP | | |
| | PKLPNGVFTPDFQEFVNKCLIKNPAERADLKMLTNHTFTKRSEVEEVDFAGWLCKTLRLNQPGTPT | | |
| | RTAV | | |
| | SEQ ID NO:105 | 1227 bp | |
| NOV21 d, | CACCGGATCCACCATGCTCGCCCGGAGGAAGCCGGTGCTGCCGGCGCTCACCATCAACCCTACCAT | | |
| 309394046 DNA | | | |
| Sequence | CGCCGAGGGCCCATCCCCTACCAGCGAGGGCGCCTCCGAGCCAAACCTGGTGGACCTGCAGAAGAA | | |
| | GCTGGAGGAGCTCGAACTTGACCAGCAGCAGAAGAAGCGGCTGGAAGCCTTTCTCACCCAGAAAGC | | |
| | CAAGGTCGGCGAACTCAAAGACGATGACTTCGAAAGGATCTCAGAGCTCGGCGCGGGCAACGGCGG | | |
| | GGTGGTCACCAAAGTCCAGCACAGACCCTCGGGCCTCATCATGGCCAGGAAGCTGATCCACCTTGA | | |
| | GATCAAGCCGGCCATCCGGAACCAGATCATCCGCGAGCTGCAGGTCCTGCACGAATGCAACTCGCC | | |
| | GTACATCGTGGGCTTCTACGGGGCCTTCTACAGTGACGGGCAGATCAGCATTTGCATGGAACACAT | | |
| | GGACGGCGGCTCCCTGGACCAGGTGCTGAAAGAGGCCAAGAGGATTCCCGAGGAGATCCTGGGGAA | | |
| | AGTCAGCATCGCGGTTCTCCCGGGCTTGGCGTACCTCCGAGAGAAGCACCAGATCATGCACCGAGA | | |
| | TGTGAAGCCCTCCAACATCCTCGTGAACTCTAGAGGGGAGATCAAGCTGTGTGACTTCGGGGTGAG | | |
| | CGGCCAGCTCATCGACTCCATGGCCAACTCCTTCGTGGGCACGCGCTCCTACATGGCTCCGGAGCG | | |
| | GTTGCAGGGCACACATTACTCGGTGCAGTCGGACATCTGGAGCATGGGCCTGTCCCTGGTGGAGCT | | |
| | GGCCGTCGGAAGGTACCCCATCCCCCCGCCCGACGCCAAAGAGCTGGAGGCCATCTTTGGCCGGCC | | |
| | CGTGGTCGACGGGGAAGAAGGAGAGCCTCACAGCATCTCGCCTCGGCCGACGCCCCCCGGGCGCCC | | |
| | CGTCAGCGGTCACGGGATGGATAGCCGGCCTGCCATGGCCATCTTTGAACTCCTGGACTATATTGT | | |
| | GAACGAGCCACCTCCTAAGCTGCCCAACGGTGTGTTCACCCCCGACTTCCAGGAGTTTGTCAATAA | | |
| | ATGCCTCATCAAGAACCCAGCGGAGCOGGCGGACCTGAAGATGCTCACAAACCACACCTTCATCAA | | |
| | GCGGTCCGAGGTGGAAGAAGTGGATTTTGCCGGCTGGTTGTGTAAAACCCTGCGGCTGAACCAGCC | | |
| | CGGCACACCCACGCGCACCGCCGTGTGAGCCGCCGCTAT | | |
| | ORF Start: at 2 | | ORF Stop: TGA at 1214 |
| | SEQ ID NO:106 | 404 aa | MW at 44770.0 kD |
| NOV21 d, | TGSTMLARRKPVLPALTINPTIAEGPSPTSEGASEANLVDLQKKLEELELDEQQKKRLEAFLTQKA | | |
| 309394046 | | | |
| Protein Sequence | KVGELKDDDREFISELGAGNGGVVTKVQHRPSGLIMARKLIHLEIKPAIRNQIIRELQVLHECNSP | | |
| | YIVCFYGAFYSDGEISICMEHNDGGSLDQVLKEAKRIPEEILGKVSIAVLRGLAYLREKHQIMHRD | | |
| | VKPSNILVNSRGEIKLCDFGVSGQLIDSMANSFVGTRSYMAPERLQGTHYSVQSDIWSMGLSLVEL | | |
| | AVGRYPIPPPDAKELEAIFGRPVVDGEEGEPHSISPRPRPPGRPVSGHGMDSRPAMAIFELLDYIV | | |
| | NEPPPKLPMGVFTPDFQEFVNKCLIKNPAERADLKMLTNHTFIKRSEVEEVDFAGWLCKTLRLMQP | | |
| | GTPTRTAV | | |
| | SEQ ID NO:107 | 1164 bp | |
| NOV21e, | CACCGGATCCACCATGCTGGCCCGGAGGAAGCCGGTGCTGCCGGCGCTCACCATCAACCCTACCAT | | |
| CG55838-04 | | | |
| DNA Sequence | CGCCGAGGGCCCATCCCCTACCAGCGAGGGCGCCTCCGACGCAAACCTGGTGGACCTGCAGAAGAA | | |
| | GCTGGAGGAGCTGGAACTTGACGAGCAGCAGAAGAAGCGGCTGGAAGCCTTTCTCACCCAGAAAGC | | |
| | CAAGGTCGGCGAACTCAAAGACGATGACTTCGAAAGGATCTCAGAGCTGGGCGCGGGCAACGGCGG | | |
| | GGTGGTCACCAAAGTCCAGCACAGACCCTCCGGCCTCATCATGGCCAGGAAGCTGATCCACCTTGA | | |
| | GATCAAGCCCGCCATCCGGAACCAGATCATCCGCGAGCTGCAGGTCCTGCACGAATGCAACTCGCC | | |
| | GTACATCGTGGGCTTCTACGGGGCCTTCTACAGTGACGGGGACATCAGCATTTGCATCGAACACAT | | |
| | GGACGGCGGCTCCCTGGACCAGGTGCTGAAAGAGGCCAAGAGGATTCCCGAGGAGATCCTGGGGAA | | |
| | AGTCAGCATCGCGGTTCTCCGGGGCTTGGCGTACCTCCGAGAGAAGCACCAGATCATGCACCGAGA | | |
| | TGTGAAGCCCTCCAACATCCTCGTGAACTCTAGAGGGGAGATCAAGCTGTGTGACTTCGGGCCGGA | | |
| | GCGGTTGCAGCGCACACATTACTCGGTGCAGTCGGACATCTGGAGCATGGGCCTCTCCCTGGTCGA | | |
| | GCTGCCCGTCGGAAGGTACCCCATCCCCCCGCCCGACGCCAAAGAGCTGGAGGCCATCTTTGGCCG | | |
| | GCCCGTGGTCGACGGGGAAGAAGGAGAGCCTCACAGCATCTCGCCTCGGCCGAGGCCCCCCGGGCG | | |
| | CCCCGTCAGCGOTCACGGGATGGATAGCCGGCCTGCCATGGCCATCTTTGAACTCCTGGACTATAT | | |
| | TGTGAACGAGCCACCTCCTAAGCTGCCCAACGGTGTGTTCACCCCCGACTTCCAGGAGTTTGTCAA | | |
| | TAAATGCCTCATCAAGAACCCAGCGGAGCGGGCGGACCTGAAGATGCTCACAAACCACACCTTCAT | | |
| | CAAGCGGTCCGAGGTGGAAGAAGTGGATTTTGCCGGCTGGTTGTGTAAAACCCTGCGGCTGAACCA | | |
| | GCCCGGCACACCCACGCGCACCGCCGTGTGAGCGGCCGCTAT | | |
| | ORF Start: ATG at 14 | | ORF Stop: TGA at 1151 |
| | SEQ ID NO:108 | 379 aa | MW at 42207.1 kD |
| NOV21c, | MLARRKPVLPALTINPTIAEGPSPTSEGASEANLVDLQKKLEELELDEQQKKRLEAFLTQKAKVGE | | |
| CG55838-04 | | | |
| Protein Sequence | LKDDDFERISELGAGNGGVVTKVQHRPSGLIMARKLIHLEIKPAIRNQIIRELQVLHECNSPYIVG | | |
| | FYGAFYSDGEISICMEHMDGGSLDQVLKEAKRIPEEILGKVSIAVLRGLAYLREKHQIMHRDVKPS | | |
| | NILVNSRGEIKLCDFGPERLQGTHYSVQSDIWSMGLSLVELAVGRYPIPPPDAKELEAIFGRPVVD | | |
| | GEEGEPHSISPRPRPPGRPVSGHGMDSRPAMAIFELLDYIVNEPPPKLPNGVFTPDFQEFVNKCLI | | |
| | KISTPAERADLKMLTNHTFIKRSEVEEVDFAGWLCKTLRLNQPGTPTRTAV | | |
| | SEQ ID NO:109 | 985 bp | |
| NOV21f | TCCACTACGGGCCCAGGCTAGAGGCGCCGCCGCCGCCGGCCCGCGGAGCCCCGATGCTGGCCCGGA | | |
| CG55838-01 | | | |
| DNA Sequence | GGAAGCCGGTGCTGCCGGCGCTCACCATCAACCCTACCATCGCCGAGGGCCCATCCCCTACCAGCG | | |
| | AGCGCGCCTCCGAGGCAAACCTGGTGGACCTGCAGAAGAAGCTGGAGGAGCTGGAACTTGACGAGC | | |
| | AGCAGAAGAAGCGGCTGGAAGCCTTTCTCACCCAGAAAGCCAAGGTCGGCGAACTCAAAGACGATG | | |
| | ACTTCGAAAGGATCTCAGAGCTGGGCGCCGGCAACGGCGGGGTGGTCACCAAAGTCCAGCACAGAC | | |
| | CCTCGGGCCTCATCATGGCCAGGAAGCTGATCCACCTTGAGATCAAGCCGGCCATCCGGAACCAGA | | |
| | TCATCCGCGAGCTGCAGGTCCTGCACGAATGCAACTCGCCGTACATCGTGGGCTTCTACGGGGCCT | | |
| | TCTACAGTGACGGGGAGATCAGCATTTGCATGGAACACATGGACGGCGGCTCCCTCGACCAGGTGC | | |
| | TGAAAGAGGCCAAGAGGATTCCCGAGGAGATCCTGGGGAAAGTCAGCATCGCGGTTCTCCGGGGCT | | |
| | TGGCGTACCTCCGAGAGAAGCACCAGATCATGCACCGAGATGTGAAGCCCTCCAACATCCTCGTGA | | |
| | ACTCTAGAGGGGAGATCAAGCTGTGTGACTTCGGGGTGAGCGGCCAGCTCATCGACTCCATGGCCA | | |
| | ACTCCTTCGTGGGCACGCGCTCCTACATGGCTCCACCTCCTAAGCTCCCCAACGGTGTGTTCACCC | | |
| | CCGACTTCCAGGACTTTGTCAATAAATGCCTCATCAAGAACCCAGCGGAGCGGGCGGACCTGAAGA | | |
| | TGCTCACAAACCACACCTTCATCAAGCGGTCCGAGGTGGAAGAAGTGGATTTTGCCCGCTAATTGT | | |
| | GTAAAACCCTGCGGCTGAACCAGCCCGGCACACCCACGCGCACCCCCGTGTACAGTGGCAA | | |
| | ORF Start: ATG at 54 | | ORF Stop: at 984 |
| | SEQ ID NO:110 | 310 aa | MW at 34532.5 kD |
| NOV21F, | MLARRKPVLPALTINPTTAEGPSPTSEGASEANLVDLQKKLEELELDEQQKKRLEAFLTQKAKVGE | | |
| CG55838-01 | | | |
| Protein Sequence | LKDDDFERISELGAGNGGVVTKVQHRPSGLIMARKLIHLEIKPAIRNQIIRELQVLHECNSPYIVG | | |
| | FYGAFYSDGEISICMEHMDGGSLDQVLKEAKRIPEEILGKVSIAVLRGLAYLREKHQIMHRDVKPS | | |
| | NILVNSRGEIKLCDFGVSGQLIDSMANSFVGTRSYMAPPPKLPNGVFTPDFQEFVNKCLIKNPAER | | |
| | ADLKMLTNHTFIKRSEVEEVDFAGWLCKTLRLNQPGTPTRTAVYSG | | |
| | SEQ ID NO:111 | 1161 bp | |
| NOV21g, | CACCGGATCCATGCTGGCCCGGAGGAAGCCGGTGCTGCCGGCGCTCACCATCAACCCTACCATCGC | | |
| CG55838-06 | | | |
| DNA Sequence | CGAGGGCCCATCCCCTACCAGCGAGGGCGCCTCCGAGGCAAACCTGGTGGACCTGCAGAAGAAGCT | | |
| | GGAGGAGCTGGAACTTGACGAGCAGCAGAAGAAGCGGCTGGAAGCCTTTCTCACCCAGAAAGCCAA | | |
| | GGTCGGCGAACTCAAAGACGATGACTTCGAAAGGATCTCAGAGCTGGGCGCGGGCAACGGCGGGGT | | |
| | GGTCACCAAAGTCCAGCACAGACCCTCGCGCCTCATCATGGCCAGGAAGCTGATCCACCTTGAGAT | | |
| | CAAGCCGGCCATCCGGAACCAGATCATCCGCGAGCTGCAGGTCCTGCACGAATGCAACTCGCCGTA | | |
| | CATCGTGGGCTTCTACGGGGCCTTCTACAGTGACGGGGAGATCAGCATTTGCATGGAACACATGGA | | |
| | CGGCGGCTCCCTGGACCAGGTGCTGAAAGAGGCCAAGAGGATTCCCGAGGAGATCCTGGGGAAAGT | | |
| | CAGCATCGCGGTTCTCCGGGGCTTGGCGTACCTCCGAGAGAAGCACCAGATCATGCACCGAGATGT | | |
| | GAAGCCCTCCAACATCCTCGTGAACTCTAGAGGGGAGATCAAGCTGTGTGACTTCGGGCCGGAGCG | | |
| | GTTGCAGGGCACACATTACTCGGTGCAGTCGGACATCTGGAGCATGGGCCTGTCCCTGGTAAAGCT | | |
| | GGCCGTCGGAAGGTACCCCATCCCCCCGCCCGACGCCAAAGAGCTGGAGGCCATCTTTGGCCGGCC | | |
| | CGTGGTCGACGGGGAAGAAGGAGAGCCTCACAGCATCTCGCCTCGGCCGAGGCCCCCCGGGCGCCC | | |
| | CGTCAGCGGTCACGCGATGGATAGCCGGCCTGCCATGGCCATCTTTGAACTCCTGGACTATATTGT | | |
| | GAACGAGCCACCTCCTAAGCTGCCCAACGGTGTGTTCACCCCCGACTTCCAGGAGTTTGTCAATAA | | |
| | ATGCCTCATCAAGAACCCAGCGGAGCGGGCGGACCTGAAGATGCTCACAAACCACACCTTCATCAA | | |
| | GCGGTCCGAGGTGGAAGAAGTGGATTTTGCCGGCTGGTTGTGTAAAACCCTGCGGCTGAACCAGCC | | |
| | CGGCACACCCACGCGCACCGCCGTGTGAGCGGCCGCAAG | | |
| | ORF Start: ATG at 11 | | ORF Stop: TGA at 1148 |
| | SEQ ID NO:112 | 379 aa | MW at 42207.1 kD |

| | |
|---|---|
| NOV21g, | MLARRKPVLPALTINPTIAEGPSPTSEGASEANLVDLQKKLEELELDEQQKKRLEAFLTQKAKVGE |
| CG55838-06 | |
| Protein Sequence | LKDDDFERISELGAGNGGVVTKVQHRPSGLIMARKLTHLEIKPAIRNQIIRELQVLHECNSPYIVG |
| | FYGAFYSDGEISICMEHMDGGSLDQVLKEAKRIPEEILGKVSIAVLRGLAYLREKHQIMHRDVKPS |
| | NILVNSRGEIKLCDFGPERLQGTHYSVQSDIWSMGLSLVELAVGRYPIPPPDAAALEAIFGRPVVD |
| | GEEGEPHSISPRPRPPGRPVSGHGMDSRPAMAIFELLDYIVNEPPPKLPNGVFTPDFQEFVNKCLI |
| | KNPAERADLKMLTNHTFIKRSEVEEVDFAGWLCKTLRLNQPGTPTRTAV |

[0470] Sequence comparison of the above protein sequences yields the following sequence relationships shown in Table 211B.

TABLE 21B
Comparison of NOV21a against NOV21b through NOV21g.

| | | Identities/ |
|---|---|---|
| | | Similarities for |
| Protein | NOV21a Residues/ | the Matched |
| Sequence | Match Residues | Region |
| NOV21b | 4 . . . 240 | 236/237 (99%) |
| | 4 . . . 240 | 237/237 (99%) |
| NOV21c | 5 . . . 404 | 398/400 (99%) |
| | 1 . . . 400 | 399/400 (99%) |
| NOV21d | 4 . . . 404 | 400/401 (99%) |
| | 4 . . . 404 | 401/401 (99%) |
| NOV21e | 5 . . . 404 | 379/400 (94%) |
| | 1 . . . 379 | 379/400 (94%) |
| NOV21f | 5 . . . 240 | 236/236 (100%) |
| | 1 . . . 236 | 236/236 (100%) |
| NOV21g | 5 . . . 404 | 379/400 (94%) |
| | 1 . . . 379 | 379/400 (94%) |

[0471] Further analysis of the NOV21 a protein yielded the following properties shown in Table 21C.

TABLE 21C
Protein Sequence Properties NOV21a

| SignalP | No Known Signal Sequence Predicted | | | |
|---|---|---|---|---|
| analysis: | | | | |
| PSORT II | PSG: a new signal peptide prediction method | | | |
| analysis: | N-region: length 10; pos. chg 3; neg. chg 0 | | | |
| | H-region: length 13; peak value 7.17 | | | |
| | PSG score: 2.77 | | | |
| | GvH: von Heijne's method for signal seq. recognition | | | |
| | GvH score (threshold: −2.1): −5.47 | | | |
| | possible cleavage site: between 23 and 24 | | | |
| | >>> Seems to have no N-terminal signal peptide | | | |
| | ALOM: Klein et al's method for TM region allocation | | | |
| | Init position for calculation: 1 | | | |
| | Tentative number of TMS(s) for the threshold 0.5: 0 | | | |
| | number of TMS(s) . . . fixed | | | |
| | PERIPHERAL Likelihood = 2.92 (at 172) | | | |
| | ALOM score: 2.92 (number of TMSs: 0) | | | |
| | MTOP: Prediction of membrane topology (Hartmann et al.) | | | |
| | Center position for calculation: 6 | | | |
| | Charge difference: 2.0 C(3.0)-N(1.0) | | | |
| | C > N: C-terminal side will be inside | | | |
| | >>>Caution: Inconsistent mtop result with signal peptide | | | |
| | MITDISC: discrimination of mitochondrial targeting seq | | | |
| | R content: | 2 | Hyd Moment (75): | 8.14 |
| | Hyd Moment (95): | 8.83 | G content: | 1 |
| | D/E content: | 1 | S/T content: | 3 |
| | Score: −2.14 | | | |
| | Gavel: prediction of cleavage sites for mitochondrial preseq | | | |
| | R-2 motif at 19 RRK\|PV | | | |
| | NUCDISC: discrimination of nuclear localization signals | | | |
| | pat4: RRKP (4) at 8 | | | |
| | pat7: none | | | |
| | bipartite: KKLEELELDEQQKKRLE at 43 | | | |
| | content of basic residues: 12.1% | | | |
| | NLS Score: 0.27 | | | |
| | KDEL: ER retention motif in the C-terminus: none | | | |
| | ER Membrane Retention Signals: none | | | |
| | SKL: peroxisomal targeting signal in the C-terminus: none | | | |
| | PTS2: 2nd peroxisomal targeting signal: none | | | |
| | VAC: possible vacuolar targeting motif: found | | | |
| | KLPN at 336 | | | |
| | RNA-binding motif: none | | | |
| | Actinin-type actin-binding motif: | | | |
| | type 1: none | | | |
| | type 2: none | | | |
| | NMYR: N-myristoylation pattern: none | | | |
| | Prenylation motif: none | | | |
| | memYQRL: transport motif from cell surface to Golgi: none | | | |
| | Tyrosines in the tail: none | | | |
| | Dileucine motif in the tail: none | | | |
| | checking 63 PROSITE DNA binding motifs: none | | | |
| | checking 71 PROSITE ribosomal protein motifs: none | | | |
| | checking 33 PROSITE prokaryotic DNA binding motifs: none | | | |
| | NNCN: Reinhardt's method for Cytoplasmic/Nuclear | | | |
| | discrimination | | | |
| | Prediction: cytoplasmic | | | |
| | Reliability: 70.6 | | | |
| | COIL: Lupas's algorithm to detect coiled-coil regions | | | |
| | 28 T | 0.63 | | |
| | 29 S | 0.80 | | |
| | 30 E | 0.80 | | |
| | 31 G | 0.80 | | |
| | 32 A | 0.95 | | |
| | 33 S | 0.95 | | |
| | 34 E | 0.99 | | |
| | 35 A | 0.99 | | |
| | 36 N | 0.99 | | |
| | 37 L | 0.99 | | |
| | 38 V | 0.99 | | |
| | 39 D | 0.99 | | |
| | 40 L | 0.99 | | |
| | 41 Q | 0.99 | | |
| | 42 K | 0.99 | | |
| | 43 K | 0.99 | | |
| | 44 L | 0.99 | | |
| | 45 E | 0.99 | | |
| | 46 E | 0.99 | | |
| | 47 L | 0.99 | | |
| | 48 E | 0.99 | | |
| | 49 L | 0.99 | | |
| | 50 D | 0.99 | | |
| | 51 E | 0.99 | | |
| | 52 Q | 0.99 | | |
| | 53 Q | 0.99 | | |
| | 54 K | 0.99 | | |
| | 55 K | 0.99 | | |
| | 56 R | 0.99 | | |
| | 57 L | 0.99 | | |
| | 58 E | 0.99 | | |
| | 59 A | 0.99 | | |
| | 60 F | 0.99 | | |
| | 61 L | 0.99 | | |
| | 62 T | 0.98 | | |
| | 63 Q | 0.98 | | |
| | 64 K | 0.98 | | |
| | 65 A | 0.98 | | |
| | 66 K | 0.98 | | |
| | 67 V | 0.85 | | |

total: 40 residues
Final Results (k = 9/23):
43.5%: mitochondrial
34.8%: nuclear
17.4%: cytoplasmic
4.3%: vacuolar
>> prediction for CG55838-05 is mit (k = 23)

[0472] A search of the NOV21 a protein against the Geneseq database, a proprietary database that contains sequences published in patents and patent publication, yielded several homologous proteins shown in Table 21D.

TABLE 21D
Geneseq Results for NOV21a

| | | | Identities/ | |
|---|---|---|---|---|
| | | | Similarities for | |
| Geneseq | Protein/Organism/Length | NOV21a Residues/ | the Matched | Expect |
| Identifier | [Patent #, Date] | Match Residues | Region | Value |
| AAY41652 | Human MEK2 protein sequence - | 5 . . . 404 | 400/400 (100%) | 0.0 |
| | Homo sapiens, 400 aa. | 1 . . . 400 | 400/400 (100%) | |
| | [US5959097-A, 28 SEP. 1999] | | | |
| AAM38714 | Human polypeptide SEQ ID NO | 5 . . . 404 | 399/400 (99%) | 0.0 |
| | 1859 - Homo sapiens, 400 aa. | 1 . . . 400 | 399/400 (99%) | |
| | [WO200153312-A1, 26 JUL. 2001] | | | |
| AAW88434 | Disease associated protein kinase | 5 . . . 404 | 398/400 (99%) | 0.0 |
| | DAPK-3 - Homo sapiens, 400 aa. | 1 . . . 400 | 399/400 (99%) | |
| | [WO9858052-A2, 23 DEC. 1998] | | | |
| AAM40501 | Human polypeptide SEQ ID NO | 7 . . . 404 | 395/398 (99%) | 0.0 |
| | 5432 - Homo sapiens, 435 aa. | 38 . . . 435 | 396/398 (99%) | |
| | [WO200153312-A1, 26 JUL. 2001] | | | |
| AAM40500 | Human polypeptide SEQ ID NO | 7 . . . 404 | 395/398 (99%) | 0.0 |
| | 5431 - Homo sapiens, 435 aa. | 38 . . . 435 | 396/398 (99%) | |
| | [WO200153312-A1, 26 JUL. 2001] | | | |

[0473] In a BLAST search of public sequence databases, the NOV21 a protein was found to have homology to the proteins shown in the BLASTP data in Table 21E.

TABLE 21E
Public BLASTP Results for NOV21a

| | | | Identities/ | |
|---|---|---|---|---|
| Protein | | | Similarities for | |
| Accession | | NOV21a Residues/ | the Matched | Expect |
| Number | Protein/Organism/Length | Match Residues | Portion | Value |
| P36507 | Dual specificity mitogen-activated | 5 . . . 404 | 400/400 (100%) | 0.0 |
| | protein kinase kinase 2 (EC 2.7.1.-) | 1 . . . 400 | 400/400 (100%) | |
| | (MAP kinase kinase 2) (MAPKK 2) | | | |
| | (ERK activator kinase 2) (MAPK/ERK | | | |
| | kinase 2) (MEK2) - Homo sapiens | | | |
| | (Human), 400 aa. | | | |
| Q91YS7 | Hypothetical 44.3 kDa protein - Mus | 5 . . . 404 | 377/400 (94%) | 0.0 |
| | musculus (Mouse), 400 aa. | 1 . . . 400 | 391/400 (97%) | |
| P36506 | Dual specificity mitogen-activated | 5 . . . 404 | 376/400 (94%) | 0.0 |
| | protein kinase kinase 2 (EC 2.7.1.-) | 1 . . . 400 | 392/400 (98%) | |
| | (MAP kinase kinase 2) (MAPKK 2) | | | |
| | (ERK activator kinase 2) (MAPK/ERK | | | |
| | kinase 2) (MEK2) - Rattus norvegicus | | | |
| | (Rat), 400 aa. | | | |
| Q9D7B0 | Mitogen activated protein kinase kinase | 5 . . . 404 | 377/401 (94%) | 0.0 |
| | 2 - Mus musculus (Mouse), 401 aa. | 1 . . . 401 | 391/401 (97%) | |
| Q63932 | Dual specificity mitogen-activated | 5 . . . 404 | 376/401 (93%) | 0.0 |
| | protein kinase kinase 2 (EC 2.7.1.-) | 1 . . . 401 | 390/401 (96%) | |
| | (MAP kinase kinase 2) (MAPKK 2) | | | |
| | (ERK activator kinase 2) (MAPK/ERK | | | |
| | kinase 2) (MEK2) - Mus musculus | | | |
| | (Mouse), 401 aa. | | | |

[0474] PFam analysis predicts that the NOV21 a protein contains the domains shown in the Table 21F.

TABLE 21F
Domain Analysis of NOV21a

| | | Identities/ | |
|---|---|---|---|
| | | Similarities for | |
| Pfam | NOV21a Match | the Matched | Expect |
| Domain | Region | Region | Value |
| pkinase | 76 . . . 373 | 88/314 (28%) | 4.9e−72 |
| | | 231/314 (74%) | |

### Example 22.

[0475] The NOV22 clone was analyzed, and the nucleotide and encoded polypeptide sequences are shown in Table 22A.

TABLE 22A
NOV22 Sequence Analysis

| | SEQ ID NO:113 | 2246 bp | |
|---|---|---|---|
| NOV22a, | CCTGAGGAAGTGCACCATGGAGAGGAGGAGGTGGAGACTTTTGCCTTTCAGGCAGAAATTGCCCAA | | |
| CG56618-02 | | | |
| DNA Sequence | CTCATGTCCCTCATCATCAATACCTTCTATTCCAACAAGGAGATTTTCCTTCGGGAGTTGATCTCT | | |
| | AATGCTTCTGATGCCTTGGACAAGATTCGCTATGAGAGCCTGACAGACCCTTCGAAGTTGGACAGT | | |
| | GGTAAAGAGCTGAAAATTGACATCATCCTCAACCCTCAGGAACGTACCCTGACTTTGGTAGACACA | | |
| | GGCATTGGCATGACCAAAGCTGATCTCATAAATAATTTGGGAACCATTGCCAAGTCTGGTACTAAA | | |
| | GCATTCATGGAGGCTCTTCAGGCTGGTGCAGACATCTCCATGATTGGGCAGTTTGGTGTTGGCTTT | | |
| | TATTCTGCCTACTTGGTGGCAGAGAAAGTGGTTGTGATCACAAAGCACAACGATGATGAACAGTAT | | |
| | GCTTGGGAGTCTTCTGCTGGAGGTTCCTTCACTGTGCGTGCTGACCATGGTGAGCCCATTGGCAGG | | |
| | GGTACCAAAGTGATCCTCCATCTTAAAGAAGATCAGACAGAGTACCTAGAAGAGAGGCGGGTCAAA | | |
| | GAAGTAGTGAAGAAGCATTCTCAGTTCATAGGCTATCCCATCACCCTTTATTTGGAGAAGGAACGA | | |
| | GAGAAGGAAATTAGTGATGATGAGGCAGAGGAAGAGAAAGGTGAGAAAGAAGAGGAAGATAAAGAT | | |
| | GATGAAGAAAAGCCCAAGATCGAAGATGTGGGTTCAGATGAGGAGGATGACAGCGGTAAGGATAAG | | |
| | GAGAAGAAAACTAAGAAGATCAAAGAGAAATACATTGATCAGGAAGAACTAAACAAGACCAAGCCT | | |
| | ATTTGGACCAGAAACCCTGATGACATCACCCAAGAGGAGTATGGAGAATTCTACAAGAGCCTCACT | | |
| | AATGACTGGGAAGACCACTTGGCAGTCAAGCACTTTTCTGTAGAAGGTCAGTTGGAATTCAGGGCA | | |
| | TTGCTATTTATTCCTCGTCGGGCTCCCTTTGACCTTTTTGAGAACAAGAAGAAAAAGAACAACATC | | |
| | AAACTCTATGTCCGCCGTGTGTTCATCATGGACAGCTGTGATGAGTTGATACCAGAGTATCTCAAT | | |
| | TTTATCCGTGGTGTGGTTGACTCTGAGGATCTGCCCCTGAACATCTCCCGAGAAATGCTCCAGCAG | | |
| | AGCAAAATCTTGAAAGTCATTCGCAAAAACATTGTTAAGAACTGCCTTGAGCTCTTCTCTGAGCTG | | |
| | GCAGAAGACAAGGAGAATTACAAGAAATTCTATGAGGCATTCTCTAAAAATCTCAAGCTTGGAATC | | |
| | CACGAACACTCCACTAACCGCCGCCGCCTGTCTGAGCTGCTGCGCTATCATACCTCCCAGTCTGGA | | |
| | GATGAGATGACATCTCTGTCAGAGTATGTTTCTCGCATCAAGGAGACACAGAAGTCCATCTATTAC | | |
| | ATCACTGGTGAGAGCAAAGAGCAGGTGGCCAACTCAGCTTTTGTGGAGCGAGTGCGGAAACGGGGC | | |
| | TTCGAGGTGGTATATATGACCGAGCCCATTGACGAGTACTGTGTGCAGCAGCTCAAGGAATTTGAT | | |
| | GGGAAGAGCCTGGTCTCAGTTACCAAGGAGGGTCTGGAGCTGCCTGAGGATGAGGAGGAGAAGAAG | | |
| | AAGATGGAAGAGAGCAAGGCAAAGTTTGAGAACCTCTGCAAGCTCATGAAAGAAATCTTAGATAAG | | |
| | AAGGTTGAGAAGGTGACAATCTCCAATAGACTTGTGTCTTCACCTTGCTGCATTGTGACCAGCACC | | |
| | TACGGCTGGACAGCCAATATGGAGCGGATCATGAAAGCCCAGGCACTTCGGGACAACTCCACCATG | | |
| | GGCTATATGATGGCCAAAAACCACCTGGAGATCAACCCTGACCACCCCATTGTAAAGACGCTGCGG | | |
| | CAGAAGGCTGAGGCCGACAAGAATGATAAGGCAGTTAAGGACCTGGTGGTGCTGCTGTTTGAAACC | | |
| | GCCCTGCTATCTTCTGGCTTTTCCCTTGAGGATCCCCAGACCCACTCCAACCGCATCTATCCCATG | | |
| | ATCAAGCTAGGTCTAGGTATTGATGAAGATGAAGTGGCAGCAGAGGAACCCAATGCTGCAGTTCCT | | |
| | GATGAGATCCCCCCTCTCGAGGGCGATGAGGATGCGTCTCGCATGGAAGAAGTCGATTAGTTAGG | | |
| | AGTTCATAGTTGGAAAACTTGTGCCCTTGTATAGTGTCCCCATaaGCTCCCACAGTACTTGTTAGC | | |
| | TA | | |
| | ORF Start: at 1 | | ORF Stop: TAG at 2170 |
| | SEQ ID NO:114 | 723 aa | MW at 83149.1 kD |
| NOV22a, | PEEVHHGEEEVETFAFQAEIAQLMSLIINTFYSNKEIFLRELISNASDALDKIRYESLTDPSKLDS | | |
| CG56618-02 | | | |
| Protein Sequence | GKELKIDIILNPQERTLTLVDTGIGMTKADLINNLGTIAKSGTKAFMEALQAGADISMIGQFGVGF | | |
| | YSAYLVAEKVVVITKHNDDEQYAWESSAGGSFTVRADHGEPIGRGTKVILHLKEDQTEYLEERRVK | | |
| | EVVKKHSQFIGYPITLYLEKEREKEISDDEAEEEKGEKEEEDKDDEEKPKIEDVGSDEEDDSGKDK | | |
| | EKKTKKIKEKYIDQEELNKTKPIWTRNPDDITQEEYGEFYKSLTNDWEDHLAVKHFSVEGQLEFRA | | |
| | LLFIPRRAPFDLFENKKKKNNIKLYVRRVFIMDSCDELIPEYLNFIRGVVDSEDLPLNISREMLQQ | | |
| | SKILKVIRKNIVKKCLELFSELAEDKENYKKFYEAFSKNLKLGIHEDSTNRRRLSELLRYHTSQSG | | |
| | DEMTSLSEYVSRMKETQKSIYYITGESKEQVANSAFVERVRKRGFEVVYMTEPIDEYCVQQLKEFD | | |
| | GKSLVSVTKEGLELPEDEEEKKKMEESKAKFENLCKLMKEILDKKVEKVTISNRLVSSPCCIVTST | | |
| | YGWTANMERIMKAQALRDNSTMGYMMAKKHLEINPDHPIVETLRQKAEADKNDKAVKDLVVLLFET | | |
| | ALLSSGFSLEDPQTHSNRIYRMIKLGLGIDEDEVAAEEPNAAVPDEIPPLEGDEDASRMEEVD | | |
| | SEQ ID NO:115 | 1365 bp | |
| NOV22b, | GGCACGAGGCTCCGGCGCAGTGTTGGGACTGTCTGGGTATCGGAAAGCAAGCCTACGTTGCTCACT | | |
| CG56618-03 | | | |
| DNA Sequence | ATTACGTATAATCCTTTTCTTTTCAAGATGCCTGAGGAAGTGCACCATGGAGAGGAGGAGGTGGAG | | |
| | ACTTTTGCCTTTCAGGCAGAATTGCCCAACTCATGTCCCTCATCATCAATACCTTCTATTCCAAAC | | |
| | AAGGAGATTTTCCTTCGGGAGTTGATCTCTAATGCTTCTGATGCCTTGGACAAGATTCGCTATGAC | | |
| | AGCCTGACAGACCCTTCGAAGTTGGACAGTGGTAAAGAGCTGAAAATTGACATCATCCCCAACCCT | | |
| | CAGGAACGTACCCTGACTTTGGTAGACACAGGCATTGGCATGACCAAAGCTGATCTCATAAATAAT | | |
| | TTGGGAACCATTGCCAAGTCTGGTACTAAAGCATTCATGGAGGCTCTTCAGATGAGGAGGATGACA | | |
| | GCGGTAAGGATAAGAAGAAGAAAACTAAGAAGATCAAAGAGAAATACATTGATCAGGAAGATGGAA | | |
| | GAGAGCAGGCAAAGTTTGAGAACCTCTGCAAGCTCATGAAAGAAATCTTAGATAAGAAAGGTTGAG | | |
| | AAGGTGACAATCTCCAATAGACTTGTGTCTTCACCTTGCTGCATTGTGACCAGCACCTACGGCTAA | | |
| | ACAGCCAATATGGAGCGGATCATGAAAGCCCAGGCACTTCGGGACAACTCCACCATGGGCTATATG | | |
| | ATGGCCAAAAAGCACCTCGAGATCAACCCTGACCACCCCATTGTGGAGACGCTGCAGAAGGCTTTG | | |
| | GAGGCCGACAAGAATGATAAGGCAGTTAAGGACCTGGTGGTGCTGCTGTTTGAAACCGCCCTGCTA | | |
| | TCTTCTGGCTTTTCCCTTGAGGATCCCCAGACCCATCTCCAACCGCATCTATCGCATGATCAAGCTA | | |
| | GGTCTAGGTATTGATGAAGATGAAGTGGCAGCAGAGGAACCCAATGCTGCAGTTCCTGATGAGATC | | |
| | CCCCCTCTCGAGGGCGATGAGGATGCGTCTCGCATGGAAGAAGTCGATTAGGTTAGGAGTTCATAG | | |
| | TTGGAAAACTTGTGCCCTTGTATAGTGTCCCCATGGGCTCCCACTGCAGCCTCGAGTGCCCCTGTC | | |
| | CCACCTCGCTCCCCCTGCTCGTGTCTAGTGTTTTTTTCCCTCTCCTGTCCTTGTGTTGAAGGCAGT | | |
| | AAACTAAGGGTGTCAAGCCCCATTCCCTCTCTACTCTTCACAGCAGGATTGGATGTTGTGTATTGT | | |
| | GGTTTATTTTATTTTCTTCATTTTGTTCTGAAATTAAAGTATGCAAAATAAAGAATATGCCGTTTT | | |
| | TATAAAAAAAAAAAAAAAAAAAAAAAAAAAAAAAAAAAAAAAAAA | | |
| | ORF Start: ATG at 94 | | ORF Stop: TAG at 1039 |
| | SEQ ID NO:116 | 315 aa | MW at 35744.6 kD |
| NOV22b, | MPEEVHHGEEEVETFAFQAEIAQLMSLIINTFYSNKEIFLRELISNASDALDKIRYESLTDPSKLD | | |
| CG56618-03 | | | |
| Protein Sequence | SGKELKIDIIPNPQERTLTLVDTGIGMTKADLINNLGTIAKSGTKAFMEALQMRRMTAVRIRRRKL | | |
| | RRSKRNTLIRKMEESRAKFENLCKLMKEILDKKVEKVTISNRLVSSPCCIVTSTYGWTANMERIMK | | |
| | AQALRDNSTMGYMMAKKHLEINPDHPIVETLRQKAEADKNDKAVKDLVVLLFETALLSSGFSLEDP | | |
| | QTHSNRIYRMIKLGLGIDEDEVAAEEPNAAVPDEIPPLEGDEDASRMEEVD | | |
| | QTHSKRIYRMIKLGLGIDEDEVAAEEPNAAVPDEIPPLEGDEDASRMEEVD | | |
| | SEQ ID NO:117 | 2564 bp | |
| NOV22c, | GGCACGAGGCTCCGGCCCAGTGTTGGGACTGTCTGGGTATCGGAAAGCAAGCCTACGTTGCTCACT | | |
| CG56618-04 | | | |
| DNA Sequence | ATTACGTATAATCCTTTTCTTTTCAAGATGCCTGAGGAAGTGCACCATGGAGAGGAGGAGGTGGAG | | |
| | ACTTTTGCCTTTCAGGCAGAAATTGCCCAACTCATGTCCCTCATCATCAATACCTTCTATTCCAAC | | |
| | AAGGAGATTTTCCTTCGGGAGTTGATCTCTAATGCTTCTGATGCCTTGGACAAGATTCGCTATGAG | | |
| | AGCCTGACAGACCCTTCGAAGTTGGACAGTGGTAAAGAGCTGAAAATTGACATCATCCCCAACCCT | | |
| | CAGGAACGTACCCTGACTTTGGTAGACACAGGCATTGGCATGACCAAAGCTGATCTCATAAATAAT | | |
| | TTGGGAACCATTGCCAAGTCTGGTACTAAAGCATTCATGGAGGCTCTTCAGGCTGGTGCAGACATC | | |
| | TCCATCATTGGGCAGTTTGGTGTTGGCTTTTATTCTGCCTACTTGGTACAGAGAAGAGTGGTTGTG | | |
| | ATCACAAAGCACAACGATGATGAACAGTATGCTTGGGAGTCTTCTGCTGGAGGTTCCTTCACTGTG | | |
| | CGTGCTGACCATGGTGAGCCCATTGGCAGGGGTACCAAAGTGATCCTCCATCTTAAAGAAGATCAG | | |
| | ACAGAGTACCTAGAAGAGAGGCGGGTCAAAGAAGTAGTGGGAAGCCATTCTCAGTTCATAGGCTAT | | |
| | CCCATCACCCTTTATTTGGAGAAGGAACGAGAGAAGGAAATTAGTGATGATGAGGCAGAGGAAGAG | | |
| | AAAGGTGAGAAAGAAGAGGAAGATAAAGATGATGAAGAAAAACCCAAGATCGAAGATGTGGGTTCA | | |
| | GATGAGGAGGATGACAGCGGTAAGGATAAGAAGAAGAAAACTAAGAAGATCAAAGAGAAATACATT | | |
| | GATCAGGAAGAACTAAACAAGACCAAGCCTATTTGGACCAGAAACCCTGATGACATCACCCAAGAG | | |
| | GAGTATGGAGAATTCTACAAGAGCCTCACTAATGACTGGGAAGACCACTTGGCAGTCAAGCACTTT | | |
| | TCTGTAGAAGGTCACTTGGAATTCAGGGCATTGCTATTTATTCCTCGTCGGGCTCCCTTTGACCTT | | |
| | TTTCAGAACAAGAAGAAAAAGAACAACATCAAACTCTATGTCCGCCGTGTGTTCATCATGGACACC | | |
| | TGTGATGAGTTGATACCAGAGTATCTCAATTTTATCCGTGGTGTGGTTGACTCTGAGGATCTGCCC | | |
| | CTGAACATCTCCCGAGAAATGCTCCAGCAGAGCAAAATCTTGAAAGTCATTCGCAAAAACATTGTT | | |
| | AGAAGTGCCTTGAGCTCTTCTCTGAGCTGGCAGAAGACAAGGAGAATTACAAGAAAATTCTATGAG | | |
| | GCATTCTCTAAAAATCTCAAGCTTGGAATCCACGAAGACTCCACTAACCCCCGCCGCCTGTCTGAG | | |
| | CTGCTGCGCTATCATACCTCCCAGTCTGCAGATGAGATGACATCTCTGTCAGAGTATGTTTCTCGC | | |
| | ATGAAGGAGACACAGAAGTCCATCTATTACATCACTGGTGAGAGCAAAGAGCAGGTGGCCAACTCA | | |
| | GCTTTTGTGGAGCGAGTGCGGAAACGGGGCTTCGAGGTGGTATATATGACCGAGCCCATTGACGAG | | |
| | TACTGTGTGCAGCAGCTCAAGGAATTTGATGGGAAGAGCCTCGTCTCAGTTACCAAGGAGGGTCTG | | |
| | GAGCTGCCTGAGGATGAGGAGGAGAAGAAGAAGATGGAAGAGAGCAAGGCAAAGTTTGAGAACCTC | | |
| | TGCAAGCTCATGAAAGAAATCTTAGATAAGAAGGTTGAGAAGGTGACAATCTCCAATAGACTTGTG | | |
| | TCTTCACCTTGCTGCATTGTGACCAGCACCTACGGCTGGACAGCCAATATGGAGCGGATCATGAAA | | |
| | GCCCAGGCACTTCGGGACAACTCCACCATGGGCTATATGATGGCCACCCCATTGTGGAGACGCTGC | | |
| | GGCAGAAGGCTGAGGCCGACAAGAATGATAAGGCAGTTAAGGACCTGGTGGTGCTGCTGTTTGAAA | | |
| | CCGCCCTGCTATCTTCTGGCTTTTCCCTTGAGCATCCCCAGACCCACTCCAACCGCATCTATCGCA | | |
| | TGATCAAGCTAGGTCTAGGTATTGATGAAGATGAAGTGGCAGCAGAGGAACCCAATGCTGCAGTTC | | |
| | CTGATGAGATCCCCCCTCTCGAGGGCGATGAGGATGCGTCTCGCATGGAAGAAGTCGATTAGGTTA | | |
| | GGAGTTCATAGTTGGAAAACTTGTGCCCTTGTATAGTGTCCCCATGGGCTCCCACTGCAGCCTCGA | | |
| | GTGCCCCTGTCCCACCTGGCTCCCCCTGCTCGTGTCTAGTGTTTTTTTCCCTCTCCTGTCCTTGTG | | |
| | TTGAAGGCAGTAAACTAAGGGTGTCAAGCCCCATTCCCTCTCTACTCTTGACACCAGGATTGGATG | | |
| | TTGTGTATTGTGGTTTATTTTATTTTCTTCATTTTGTTCTGAAATTAAAGTATGCAAAATAAAGAA | | |
| | TATGCCGTTTTTATAAAAAAAAAAAAAAAAAAAAAAAAAAAAAAAAAAAAAAAAA | | |
| | ORF Start: ATG at 94 | | ORF Stop: TGA at 2113 |
| | SEQ ID NO:118 | 673 aa | MW at 78025.1 kD |
| NOV22c, | MPEEVHHGEEEVETFAFQAEIAQLMSLIINTFYSNKEIFLRELISNASDALDKIRYESLTDPSKLD | | |
| CG56618-04 | | | |
| Protein Sequence | SGKELKIDIIPNPQERTLTLVDTGIGMTKADLINNLGTTAKSGTKAFMEALQAGADISMIGQFGVG | | |
| | FYSAYLVAEKVVVITKHNDDEQYAWESSAGGSFTVRADHGEPIGRGTKVILHLKEDQTEYLEERRV | | |
| | KEVVKKHSQFIGYPITLYLEKEREKEISDDEAEEKGEKEEEKDKKEEKPKIEDSVGSDEEDDSGKD | | |
| | KKKKTKKIKEKYIDQEELNKTKPIWTRNPDDITQEEYGEFYKSLTNDWEDHLAVKHFSVEGQLEFR | | |
| | ALLFIPRRAPFDLFENKKKKNNIKLYVRRVFIMDSCDELIPEYLNFIRGVVDSEDLPLNISREMLQ | | |
| | QSKILKVIRKNIVKKCLELFSELAEDKENYKKFYEAFSKNLKLGIHEDSTNRRRLSELLRYHTSQS | | |
| | GDEMTSLSEYVSRMKETQKSIYYITGESKEQVANSAFVERVRKRGFEVVYMTEPIDEYCVQQLKEF | | |
| | DGKSLVSVTKEGLELPEDEEEKKKMEESKAKFENLCKLMKEILDKKVEKVTISNRLVSSPCCIVTS | | |
| | TYGWTANMERIMKAQALRDNSTMGYMMATPLWRRCGRRLRPTRMIRQLRTWWCCCLKPPCYLLAFP | | |
| | LRIPRPTPTASIA | | |
| | SEQ ID NO:119 | 2540 bp | |
| NOV22d, | CTCCCGCGCAGTGTTGGGACTGTCTGGGTATCGGAAAGCAAGCCTACGTTGCTCACTATTACGTAT | | |
| CG56618-01 | | | |
| DNA Sequence | AATCCTTTTCTTTTCAAGATGCCTGAGGAAGTGCACCATCGAGAGGAGGAGGTGGAGACTTTTGCC | | |
| | TTTCAGGCAGAAATTGCCCAACTCATGTCCCTCATCATCAATACCTTCTATTCCAACAAGGAGATT | | |
| | TTCCTTCGGGAGTTGATCTCTAATGCTTCTGATGCCTTGGACAAGATTCGCTATGAGAGCCTGACA | | |
| | GACCCTTCGAAGTTGGACAGTGGThAAGAGCTGAAAATTGACATCATCCCCAACCCTCAGGAACGT | | |
| | ACCCTGACTTTGGTAGACACAGGCATTGGCATGACCAAAGCTGATCTCATAAATAATTTGGGAACC | | |
| | ATTGCCAAGTCTGGTACTAAAGCATTCATGGAGGCTCTTCAGGCTGGTGCAGACATCTCCATGATT | | |
| | GGGCAGTTTGOTGTTGGCTTTTATTCTGCCTACTTGGTCGCAGAGAAAGTGGTTGTGATCAGAAAG | | |
| | CACAACGATGATGAACAGTATGCTTGGGAGTCTTCTGCTGGAGGTTCCTTCACTGTGCGTGCTGAC | | |
| | CATGGTGAGCCCATTGGCATGGGTACCAAAGTGATCCTCCATCTTAAAGAAGATCAGACAGAGTAC | | |
| | CTAGAAGAGAGGCGGGTCAAAGAAGTAGTGAAGAAGCATTCTCAGTTCATAGGCTATCCCATCACC | | |
| | CTTTATTTGGAGAAGGAACGAGAGAAGGAAATTAGTGATGATGAGGCAGAGCAAGAGAAAGGTGAG | | |
| | AAAGAAGACGAAGATAAAGATGATGAAGAAAAGCCCAAGATCGAAGATGTGGGTTCAGATGAGGAG | | |
| | GATGACAGCGGTAAGGATAAGAAGAAGAAAACTAAGAAGATCAAAGAGAAATACATTGATCAGGAA | | |
| | GAACTAAACAAGACCAAGCCTATTTGGACCAGAAACCCTGATGACATCACCCAAGAGGAGTATGGA | | |
| | GAATTCTACAAGAGCCTCACTAATGACTGGGAAGACCACTTGGCAGTCAAGCACTTTTCTGTAGAA | | |
| | GGTCAGTTGAATTCAGGCCATTGCTATTTATTCCTCGTCGGGCTCCCTTTGACCTTTTTGAGAAAC | | |
| | AAGAAGAAAAAGAACAACATCAAACTCTATGTCCGCCGTGTGTTCATCATGGACAGCTGTGATGAG | | |
| | TTGATACCAGAGTATCTCAATTTTATCCGTCGTGTGGTTGACTCTGAGGATCTGCCCCTGAACATC | | |
| | TCCCGAGAAATGCTCCAGCAGAGCAAAATCTTGAAAGTCATTCGCAAAAACATTGTTAAGAAGTGC | | |
| | CTTGAGCTCTTCTCTGAGCTCGCACAAGACAAGGAGAATTACAAGAAATTCTATGAGGCATTCTCT | | |
| | AAAAATCTCAAGCTTGGAATCCACGAAGACTCCACTAACCGCCGCCGCCTGTCTGAGCTGCTGCGC | | |
| | TATCATACCTCCCAGTCTGGAGATGAGATGACATCTCTGTCAGAGTATGTTTCTCGCATGAAGGAG | | |
| | ACACAGAAGTCCATCTATTACATCACTGGTGAGAGCAAGAGCAGGTGGCCAACTCAGCTTTTGGTG | | |
| | GAGCGAGTGCGGAAACGGGGCTTCGAGGTGGTATATATGACCGAGCCCATTGACGAGTACTGTGTG | | |
| | CAGCAGCTCAAGGAATTTGATGGGAAGAGCCTGGTCTCAGTTACCAAGGAGGGTCTGGAGCTGCCT | | |
| | GAGGATGAGGAGGAGAAGAAGAAGATGGAAGAGAGCAAGGCAAAGTTTGAGAACCTCTGCAAGCTC | | |
| | ATGAAACAAATCTTAGATAAGAAGGTTGAGAAGGTGACAATCTCCAATAGACTTGTGTCTTCACCT | | |
| | TGCTGCATTGTGACCAGCACCTACGGCTGGACAGCCAATATGGAGCGGATCATGAAAGCCCAGGCA | | |
| | CTTCGGGACAACTCCACCATGGGCTATATGATGGCCAAAAAGCACCTGGAGATCAACCCTGACCAC | | |
| | CCCATTGTGGAGACGCTGCGGCAGAAGGCTGAGGCCGACAGAATGATAAGGCAGTTAAGCGACCTG | | |
| | GTGGTGCTGCTGTTTGAAACCGCCCTGCTATCTTCTGGCTTTTCCCTTGAGGATCCCCAGACCCAC | | |
| | TCCAACCGCATCTATCGCATGATCAAGCTAGGTCTAGGTATTGATGAAGATGAAGTGGCAGCAGAG | | |
| | GAACCCAATGCTGCAGTTCCTGATGAGATCCCCCCTCTCGAGCGCGATGAGGATGCGTCTCGCATG | | |
| | GAAGAAGTCGATTAGGTTAGGAGTTCATAGTTGGAAAACTTGTGCCCTTGTATAGTGTCCCCATGG | | |
| | GCTCCCACTGCAGCCTCGACTGCCCCTGTCCCACCTGGCTCCCCCTGCTGGTGTCTAGTGTTTTTT | | |
| | TCCCTCTCCTGTCCTTGTGTTGAAGGCAGTAAACTAAGGGTGTCAAGCCCCATTCCCTCTCTACTC | | |
| | TTGACAGCAGGATTGGATGTTGTGTATTGTCGTTTATTTTATTTTCTTCATTTTGTTCTGTtTTTA | | |
| | AAGTATGCAAAATAAAGAATATGCCGTTTTTA | | |
| | ORF Start: ATG at 85 | | ORF Stop: TAG at 2257 |
| | SEQ ID NO:120 | 724 aa | MW at 83293.4 kD |

| | |
|---|---|
| NOV22d, | MPEEVHHGEEEVETFAFQAETAQLMSLIINTFYSNKEIFLRELISNASDALDKTRYESLTDPSKLD |
| CG56618-01 | |
| Protein Sequence | SGKELKIDIIPMPQERTLTLVDTGIGMTKADLINNLGTIAKSGTKAFMEALQAGADISMIGQFGVG |
| | FYSAYLVAEKVVVIRKHNDDEQYAWESSAGGSFTVRADHGEPIGMGTKVILHLKEDQTEYLEERRV |
| | KEVVKKHSQFIGYPITLYLEKEREKEISDDEAEEEKGEKEEEDKDDEEKPKIEDVGSDEEDDSGKD |
| | KKKKTKKIKEKYIDQEELNKTKPIWTRNPDDITQEEYGEFYKSLTNDWEDHLAVKHFSVEGQLEFR |
| | ALLFIPRRAPFDLFENKKKKNNIKLYVRRVFIMDSCDELIPEYLNFIRGVVDSEDLPLNISREMLQ |
| | QSKILKVIRKNIVKKCLELFSELAEDKENYKKFYEAFSKNLKLGIHEDSTMRRRLSELLRYHTSQS |
| | GDEMTSLSEYVSRMETQKSIYYITGESKEQVANSAFVERVRKRGFEVVYMTEPTDEYCVQQQLKEF |
| | DGKSLVSVTKEGLELPEDEEEKKKMEESKAKFEMLCKLMKEILDKKVEKVTISNRLVSSPCCIVTS |
| | TYGWTANMERIMKAQALRDNSTMGYMMAKKHLEINPDHPIVETLRQKAEADKNDKAVKDLVVLLFE |
| | TALLSSGFSLEDPQTHSNRIYRMIKLGLGIDEDEVAAEEPNAAVPDEIPPLEGDEDASRMEEVD |

[0476] Sequence comparison of the above protein sequences yields the following sequence relationships shown in Table 22B.

TABLE 22B
Comparison of NOV22a against NOV22b through NOV22d.

| | | Identities/ |
|---|---|---|
| | | Similarities for |
| Protein | NOV22a Residues/ | the Matched |
| Sequence | Match Residues | Region |
| NOV22b | 550 . . . 723 | 172/174 (98%) |
| | 142 . . . 315 | 174/174 (99%) |
| NOV22c | 1 . . . 621 | 619/621 (99%) |
| | 2 . . . 622 | 620/621 (99%) |
| NOV22d | 1 . . . 723 | 719/723 (99%) |
| | 2 . . . 724 | 720/723 (99%) |

[0477] Further analysis of the NOV22a protein yielded the following properties shown in Table 22C.

TABLE 22C
Protein Sequence Properties NOV22a

| SignalP analysis: | No Known Signal Sequence Predicted | | | | |
|---|---|---|---|---|---|
| PSORT II analysis: | PSG: a new signal peptide prediction method | | | | |
| | N-region: length 10; pos. chg 0; neg. chg 5 | | | | |
| | H-region: length 1; peak value 0.00 | | | | |
| | PSG score: −4.40 | | | | |
| | GvH: von Heijne's method for signal seq. recognition | | | | |
| | GvH score (threshold: −2.1): −7.04 | | | | |
| | possible cleavage site: between 49 and 50 | | | | |
| | >>> Seems to have no N-terminal signal peptide | | | | |
| | ALOM: Klein et al's method for TM region allocation | | | | |
| | Init position for calculation: 1 | | | | |
| | Tentative number of TMS(s) for the threshold 0.5: 1 | | | | |
| | Number of TMS(s) for threshold 0.5: 1 | | | | |
| | INTEGRAL | Likelihood = | −2.50 | Transmembrane | 653-669 |
| | PERIPHERAL | Likelihood = | 1.48 (at 129) | | |
| | ALOM score: −2.50 (number of TMSs: 1) | | | | |
| | MTOP: Prediction of membrane topology (Hartmann et al.) | | | | |
| | Center position for calculation: 660 | | | | |
| | Charge difference: 1.5 C(1.5)-N(0.0) | | | | |
| | C > N: C-terminal side will be inside | | | | |
| | >>> Single TMS is located near the C-terminus | | | | |
| | >>> membrane topology: type Nt (cytoplasmic tail 1 to 652) | | | | |
| | MITDISC: discrimination of mitochondrial targeting seq | | | | |
| | R content: | 0 | Hyd Moment(75): | 6.77 | |
| | Hyd Moment(95): | 5.71 | G content: | 0 | |
| | D/E content: | 2 | S/T content: | 0 | |
| | Score: −7.00 | | | | |
| | Gavel: prediction of cleavage sites for mitochondrial preseq | | | | |
| | cleavage site motif not found | | | | |
| | NUCDISC: discrimination of nuclear localization signals | | | | |
| | pat4: KKKK (5) at 346 | | | | |
| | pat7: none | | | | |
| | bipartite: none | | | | |
| | content of basic residues: 14.7% | | | | |
| | NLS Score: −0.16 | | | | |
| | KDEL: ER retention motif in the C-terminus: none | | | | |
| | ER Membrane Retention Signals: none | | | | |
| | SKL: peroxisomal targeting signal in the C-terminus: none | | | | |
| | PTS2: 2nd peroxisomal targeting signal: none | | | | |
| | VAC: possible vacuolar targeting motif: none | | | | |
| | RNA-binding motif: none | | | | |
| | Actinin-type actin-binding motif: | | | | |
| | type 1: none | | | | |
| | type 2: none | | | | |
| | NMYR: N-myristoylation pattern: none | | | | |
| | Prenylation motif: none | | | | |
| | memYQRL: transport motif from cell surface to Golgi: none | | | | |
| | Tyrosines in the tail: too long tail | | | | |
| | Dileucine motif in the tail: found | | | | |
| | LL at 331 | | | | |
| | LL at 453 | | | | |
| | checking 63 PROSITE DNA binding motifs: none | | | | |
| | checking 71 PROSITE ribosomal protein motifs: none | | | | |
| | checking 33 PROSITE prokaryotic DNA binding motifs: none | | | | |
| | NNCN: Reinhardt's method for Cytoplasmic/Nuclear | | | | |
| | discrimination | | | | |
| | Prediction: cytoplasmic | | | | |
| | Reliability: 70.6 | | | | |
| | COIL: Lupas's algorithm to detect coiled-coil regions | | | | |
| | 213 L | 0.55 | | | |
| | 214 Y | 0.78 | | | |
| | 215 L | 0.94 | | | |
| | 216 E | 0.94 | | | |
| | 217 K | 0.94 | | | |
| | 218 E | 0.94 | | | |
| | 219 R | 0.94 | | | |
| | 220 E | 0.94 | | | |
| | 221 K | 0.94 | | | |
| | 222 E | 0.94 | | | |
| | 223 I | 0.94 | | | |
| | 224 S | 0.94 | | | |
| | 225 D | 0.94 | | | |
| | 226 D | 0.94 | | | |
| | 227 E | 0.94 | | | |
| | 228 A | 0.94 | | | |
| | 229 E | 0.94 | | | |
| | 230 E | 0.94 | | | |
| | 231 E | 0.94 | | | |
| | 232 K | 0.94 | | | |
| | 233 G | 0.94 | | | |
| | 234 E | 0.94 | | | |
| | 235 K | 0.94 | | | |
| | 236 E | 0.94 | | | |
| | 237 E | 0.94 | | | |
| | 238 E | 0.94 | | | |
| | 239 D | 0.94 | | | |
| | 240 K | 0.94 | | | |
| | 241 D | 0.94 | | | |
| | 242 D | 0.94 | | | |
| | 243 E | 0.78 | | | |
| | 244 E | 0.78 | | | |
| | 245 K | 0.78 | | | |
| | 540 E | 0.79 | | | |
| | 541 L | 0.79 | | | |
| | 542 P | 0.79 | | | |
| | 543 E | 1.00 | | | |
| | 544 D | 1.00 | | | |
| | 545 E | 1.00 | | | |
| | 546 E | 1.00 | | | |
| | 547 E | 1.00 | | | |
| | 548 K | 1.00 | | | |
| | 549 K | 1.00 | | | |
| | 550 K | 1.00 | | | |
| | 551 M | 1.00 | | | |
| | 552 E | 1.00 | | | |
| | 553 E | 1.00 | | | |
| | 554 S | 1.00 | | | |
| | 555 K | 1.00 | | | |
| | 556 A | 1.00 | | | |
| | 557 K | 1.00 | | | |
| | 558 F | 1.00 | | | |
| | 559 E | 1.00 | | | |
| | 560 N | 1.00 | | | |
| | 561 L | 1.00 | | | |
| | 562 C | 1.00 | | | |
| | 563 K | 1.00 | | | |
| | 564 L | 1.00 | | | |
| | 565 M | 1.00 | | | |
| | 566 K | 1.00 | | | |
| | 567 E | 1.00 | | | |
| | 568 I | 1.00 | | | |
| | 569 L | 1.00 | | | |
| | 570 D | 1.00 | | | |
| | 571 K | 1.00 | | | |
| | 572 K | 1.00 | | | |
| | 573 V | 0.95 | | | |
| | 574 E | 0.95 | | | |
| | 575 K | 0.78 | | | |
| | 576 V | 0.74 | | | |

```
total: 70 residues
Final Results (k = 9/23):
26.1%: cytoplasmic
26.1%: nuclear
13.0%: Golgi
13.0%: endoplasmic reticulum
  8.7%: mitochondrial
  8.7%: vesicles of secretory system
  4.3%: peroxisomal
>> prediction for CG56618-02 is cyt (k = 23)
```

[0478] A search of the NOV22a protein against the Geneseq database, a proprietary database that contains sequences published in patents and patent publication, yielded several homologous proteins shown in Table 22D.

TABLE 22D
Geneseq Results for NOV22a

| | | | Identities/ | |
|---|---|---|---|---|
| | | | Similarities for | |
| Geneseq | Protein/Organism/Length | NOV22a Residues/ | the Matched | Expect |
| Identifier | [Patent #, Date] | Match Residues | Region | Value |
| ABB06994 | Human Hsp90 beta protein SEQ ID | 1 . . . 723 | 719/723 (99%) | 0.0 |
| | NO: 1 - Homo sapiens, 724 aa. | 2 . . . 724 | 720/723 (99%) | |
| | [WO200215925-A1, 28 FEB. 2002] | | | |
| AAB36507 | Human Hsp90 beta protein sequence | 1 . . . 723 | 719/723 (99%) | 0.0 |
| | SEQ ID NO: 6 - Homo sapiens, 724 | 2 . . . 724 | 720/723 (99%) | |
| | aa. [WO200068693-A2, | | | |
| | 16 NOV. 2000] | | | |
| AAB82537 | Human heat shock protein Hsp84 - | 1 . . . 723 | 719/723 (99%) | 0.0 |
| | Homo sapiens, 724 aa. | 2 . . . 724 | 720/723 (99%) | |
| | [WO200152791-A2, 26 JUL. 2001] | | | |
| AAE12989 | Human Hsp90 family homologue, | 1 . . . 723 | 719/723 (99%) | 0.0 |
| | Hsp84 - Homo sapiens, 724 aa. | 2 . . . 724 | 720/723 (99%) | |
| | [US2001034042-A1, 25 OCT. 2001] | | | |
| AAB82536 | Human heat shock protein Hsp86 - | 8 . . . 723 | 622/719 (86%) | 0.0 |
| | Homo sapiens, 732 aa. | 14 . . . 732 | 679/719 (93%) | |
| | [WO200152791-A2, 26 JUL. 2001] | | | |

[0479] In a BLAST search of public sequence databases, the NOV22a protein was found to have homology to the proteins shown in the BLASTP data in Table 22E.

TABLE 22E
Public BLASTP Results for NOV22a

| | | | Identities/ | |
|---|---|---|---|---|
| Protein | | | Similarities for | |
| Accession | | NOV22a Residues/ | the Matched | Expect |
| Number | Protein/Organism/Length | Match Residues | Portion | Value |
| P08238 | Heat shock protein HSP 90-beta (HSP | 1 . . . 723 | 721/723 (99%) | 0.0 |
| | 84) (HSP 90) - Homo sapiens | 1 . . . 723 | 722/723 (99%) | |
| | (Human), 723 aa. | | | |
| CAC18968 | Sequence 5 from Patent WO0068693 - | 1 . . . 723 | 719/723 (99%) | 0.0 |
| | Homo sapiens (Human), 724 aa. | 2 . . . 724 | 720/723 (99%) | |
| HHMS84 | heat shock protein 84 - mouse, 724 aa. | 1 . . . 723 | 718/723 (99%) | 0.0 |
| | | 2 . . . 724 | 721/723 (99%) | |
| P11499 | Heat shock protein HSP 90-beta (HSP | 1 . . . 723 | 715/723 (98%) | 0.0 |
| | 84) (Tumor specific transplantation 84 | 1 . . . 723 | 719/723 (98%) | |
| | kDa antigen) (TSTA) - Mus musculus | | | |
| | (Mouse), 723 aa. | | | |
| E980235 | H. SAPIENS HSP90 SEQUENCE - | 1 . . . 723 | 717/723 (99%) | 0.0 |
| | Homo sapiens (Human), 724 aa. | 2 . . . 724 | 718/723 (99%) | |

[0480] PFam analysis predicts that the NOV22a protein contains the domains shown in the Table 22F.

TABLE 22F
Domain Analysis of NOV22a

| | | Identities/ | |
|---|---|---|---|
| | NOV22a | Similarities for | |
| Pfam | Match | the Matched | Expect |
| Domain | Region | Region | Value |
| HATPase_c | 34 . . . 188 | 23/165 (14%) | 1.7e−11 |
| | | 105/165 (64%) | |
| HSP90 | 190 . . . 723 | 383/543 (71%) | 0 |
| | | 519/543 (96%) | |

### Example 23.

[0481] The NOV23 clone was analyzed, and the nucleotide and encoded polypeptide sequences are shown in Table 23A.

TABLE 23A
NOV23 Sequence Analysis

| | SEQ ID NO:121 | 2442 bp | |
|---|---|---|---|
| NOV23a, | TGCAGTTGCTTCCTTTCCTTGAAGGTAGCTGTATCTTATTTTCTTTAAAAAGCTTTTTCTTCCAAA | | |
| CG57509-01 | | | |
| DNA Sequence | GCCACTTGCCATGCCGACCGTCATTAGCGCATCTGTGGCTCCAAGGACAGCGGCTGAGCCCCGGTC | | |
| | CCCAGGGCCAGTTCCTCACCCGGCCCAGAGCAAGGCCACTGAGGCTGGGGGTGGAAACCCAAGTGG | | |
| | CATCTATTCAGCCATCATCAGCCGCAATTTTCCTATTATCGGAGTGAAAGAGAAGACATTCGAGCA | | |
| | ACTTCACAAGAAATGTCTAGAAAAGAAAGTTCTTTATGTGGACCCTGAGTTCCCACCGGATGAGAC | | |
| | CTCTCTCTTTTATAGCCAGAAGTTCCCCATCCAGTTCGTCTGGAAGAGACCTCCGGAAATTTGCGA | | |
| | GAATCCCCGATTTATCATTGATGGAGCCAACAGAACTGACATCTGTCAAGGAGAGCTAGGGGACTG | | |
| | CTGGTTTCTCGCAGCCATTGCCTQCCTGACCCTGAACCACCACCTTCTTTTCCGAGTCATACCCCA | | |
| | TGATCAAAGTTTCATCGAAAACTACGCAGGGATCTTCCACTTCCAGTTCTGGCGCTATGGAGAGTG | | |
| | GGTGGACGTGGTTATAGATGACTGCCTGCCAACGTACAACAATCAACTGGTTTTCACCAAGTCCAA | | |
| | CCACCGCAATGAGTTCTGGAGTGCTCTGCTGGAGAAGGCTTATGCTAAGCTCCATGGTTCCTACGA | | |
| | AGCTCTGAAAGGTGGGAACACCACAGAGGCCATGGAGGACTTCACAGGAGGGGTGGCAGAGTTTTT | | |
| | TGAGATCAGGGATGCTCCTAGTGACATGTACAAGATCATGAAGAAAGCCATCGAGAGAGGCTCCCT | | |
| | CATGGGCTGCTCCATTGATACAATCATTCCGGTTCAGTATGAGACAAGAATGGCCTGCGGGCTGGT | | |
| | CAGAGGTCACGCCTACTCTGTCACGGGGCTGGATGAGGTCCCGTTCAAAGGTGAGAAAGTGAAGCT | | |
| | GGTGCCGCTCCGGAATCCGTGGGGCCAGGTGGAGTGGAACGGTTCTTGGAGTGATAGATGGAAGGA | | |
| | CTGGAGCTTTGTCGACAAAGATGAGAAGGCCCGTCTGCAGCACCAGGTCACTGAGGATGAGAAGTT | | |
| | CTGGATGTCCTATGAGGATTTCATCTACCATTTCACAAAGTTGGAGATCTGCAACCTCACGGCCGA | | |
| | TGCTCTGCAGTCTGACAAGCTTCAGACCTGGACAGTGTCTGTCAACGAGGGCCGCTGGGTACGGGG | | |
| | TTGCTCTGCCGGAGGCTGCCGCAACTTCCCAGATACTTTCTGGACCAACCCTCAGTACCGTCTGAA | | |
| | GCTCCTGGAGGAGGACGATGACCCTGATGACTCGGAGGTGATTTGCAGCTTCCTGCTGGCCCTGAT | | |
| | GCAGAAGAACCGGCGGAAGGACCGGAAQCTAGGGGCCAGTCTCTTCACCATTGGCTTCGCCATCTA | | |
| | CGAGGTTCCCAAAGAGATGCACGGGAACAAGCAGCACCTGCAGAAGGACTTCTTCCTGTACAACGC | | |
| | CTCCAAGGCCAGGAGCAAAACCTACATCAACATGCGGGAGGTGTCCCAGCGCTTCCCCCTGCCTCC | | |
| | CAGCGAGTACGTCATCGTGCCCTCCACCTACGAGCCCCACCAGGAGGGGGAATTCATCCTCCGGGT | | |
| | CTTCTCTGAAAAGAGGAACCTCTCTGAGGAAGTTGAAAATACCATCTCCGTGGATCGGCCAGTCAA | | |
| | AAAGAAAAAAACCAAGCCCATCATCTTCGTTTCGGACAGAGCAAACAGCAACAAGGAGCTGGGTGT | | |
| | GGACCAGGAGTCAGAGGAGGGCAAAGGCAAAACAAGCCCTGATAAGCAAAAGCAGTCCCCACAGCC | | |
| | ACAGCCTGGCAGCTCTGATCAGGAAAGTGAGGAACAGCAACAATTCCGGAACATTTTCAAGCAGAT | | |
| | AGCAGGAGATGACATGGAGATCTGTGCAGATGAGCTCAAGAAGGTCCTTAACACAGTCGTGAACAA | | |
| | ACACAAGGACCTGAAGACACACGOGTTCACACTGGAGTCCTGCCGTAGCATGATTGCGCTCATGGA | | |
| | TACAGATGGCTCTGGAAAGCTCAACCTGCAGGAGTTCCACCACCTCTGGAACAAGATTAAGGCCTG | | |
| | GCAGAAAATTTTCAAACACTATGACACAGACCAGTCCGGCACCATCAACAGCTACGAGATGCGAAA | | |
| | TGCAGTCAACGACGCAGGATTCCACCTCAACAACCAGCTCTATGACATCATTACCATGCGGTACGC | | |
| | AGACAAACACATGAACATCGACTTTGACAGTTTCATCTGCTGCTTCGTTAGGCTGGAGGGCATGTT | | |
| | CAGAGCTTTCATGCATTTGACAAGGATGGAGATGGTATCATCAAGCTCAACGTTCTGGAGTTGGCT | | |
| | GCAGCTCACCATGTATGCCTGAACCAGGCTCOCCTCATCCAAAGCCATGCACGATCACTCACGATT | | |
| | ORF Start: ATG at 77 | | ORF Stop: TGA at 2396 |
| | SEQ ID NO:122 | 773 aa | MW at 88985.0 kD |

| NOV23a, | MPTVISASVAPRTAAEPRSPGPVPHPAQSKATEAGGGNPSGIYSAIISRNFPIIGVKEKTFEQLHK | |
|---|---|---|
| CG57509-01 | | |
| Protein Sequence | KCLEKKVLYVDPEFPPDETSLFYSQKFPIQFVWKRPPEICENPRFIIDGANRTDICQGELGDCWFL | |
| | AAIACLTLNQHLLFRVIPHDQSFIENYAGIFHFQFWRYGEWVDVVIDDCLPTYNNQLVFTKSNHRN | |
| | EFWSALLEKAYAKLHGSYEALKGGNTTEAMEDFTGGVAEFFEIRDAPSDMYKIMKKAIERGSLMGC | |
| | SIDTIIPVQYETRMACGLVRGHAYSVTGLDEVPFKGEKVKLVRLRNPWGQVEWNGSWSDRWKDWSF | |
| | VDKDEKARLQHQVTEDGEFWMSYEDFIYHFTKLEICNLTADALQSDKLQTWTVSVNEGRWVRGCSA | |
| | GGCRNFPDTFWTNPQYRLKLLEEDDDPDDSEVICSFLVALMQKNRRKDRKLGASLFTIGFAIYEVP | |
| | KEMHGNKQHLQKDFFLYNASKARSKTYINMREVSQRFRLPPSEYVIVPSTYEPHOECEFILRVFSE | |
| | KRNLSEEVENTISVDRPVKKKKTKPIIFVSDRANSNKELGVDQESEEGKGKTSPDKQKQSPQPQPG | |
| | SSDQESEEQQQFRNIFKQIAGDDMEICADELKKVLNTVVNKHKDLKTHGFTLESCRSMIALMDTDG | |
| | SGKLMLQEFHHLWNKIKAWQKIFKHYDTDQSGTINSYEMRNAVNDAGFHLNNQLYDIITMRYADKH | |
| | MNIDFDSFICCFVRLEGMFRAFHAFDKDGDGIIKLNVLEWLQLTMYA | |
| | SEQ ID NO:123 | 2469 bp |

| NOV23b, | TATGCCGACCGTCATTAGCGCATCTGTGGCTCCAAGGACAGCGGCTGAGCCCCGGTCCCCAGGGCCA | | |
|---|---|---|---|
| CG57509-02 | | | |
| DNA Sequence | GTTCCTCACCCGGCCCAGAGCAAGGCCACTGAGGCTGGGGGTGGAAACCCAAGTGGGCATCTATTCA | | |
| | GCCATCATCAGCCGCAATTTTCCTATTATCGGAGTGAAAGAGAAGACATTCGAGCAACTTCACAAG | | |
| | AAATGTCTAGAAAAGAAAGTTCTTTATGTGGACCCTGAGTTCCCACCGGATGAGACCTCTCTCTTT | | |
| | TATAGCCAGAAGTTCCCCATCCAGTTCGTCTGGAAGAGACCTCCGGAAATTTGCGAGAATCCCCGA | | |
| | TTTATCATTGATGGAGCCAACAGAACTGACATCTGTCAAGGAGAGCTAGGGGACTGCTGGTTTCTC | | |
| | GCAGCCATTGCCTGCCTGACCCTGAACCAGCACCTTCTTTTCCGAGTCATACCCCATGATCAAAGT | | |
| | TTCATCGAAAACTACGCAGGGATCTTCCACTTCCAGTTCTGGCGCTATGGAGAGTGAATGGACGTG | | |
| | GTTATAGATGACTGCCTGCCAACGTACAACAATCAACTGGTTTTCACCAAGTCCAACCACCGCAAT | | |
| | GAGTTCTGGAGTGCTCTGCTGGAGAAGGCTTATGCTAAGCTCCATGGTTCCTACGAAGCTCTGAAA | | |
| | GGTGGGAACACCACAGAGGCCATGGAGGACTTCACAGGAGGGGTOGCAGAGTTTTTTGAGATCAGG | | |
| | GATGCTCCTAGTGACATGTACAAGATCATGAAGAAAGCCATCGAGAGAGGCTCCCTCATAAACTGC | | |
| | TCCATTGATGATCGCACGAACATGACCTATGGAACCTCTCCTTCTGGTCTGAACATAAGCGAGTTG | | |
| | ATTGCACGGATGGTAAGGAATATGGATAACTCACTGCTCCAGGACTCAGACCTCGACCCCAGAAAC | | |
| | TCAGATGAAAGACCGACCCGGACAATCATTCCGGTTCAGTATGAGACAAGAATGGCCTGCGGGCTG | | |
| | GTCAGAGGTCACGCCTACTCTCTCACGGGGCTGGATGAGGTCCCGTTCAAGGTGAGAAAGTGAAAG | | |
| | CTGGTGCGGCTGCCGAATCCGTGGGGCCAGGTGGACTCGAACGGTTCTTGGAGTGATAGATGGAAG | | |
| | GACTGGAGCTTTGTGGACAAAGATGAGAAGGCCCGTCTGCAGCACCAGGTCACTGAGGATGGAGAG | | |
| | TTCTGGATGTCCTATGAGGATTTCATCTACCATTTCACAAGTTGGAGATCTGCAACCTCACAAACC | | |
| | GATGCTCTGCAGTCTGACAAGCTTCAGACCTGGACAGTGTCTGTGAACGAGGGCCGCTGGGTACGG | | |
| | GGTTGCTCTGCCCGAGGCTGCCGCAACTTCCCAGATACTTTCTGGACCAACCCTCAGTACCGTCTG | | |
| | AAGCTCCTGGAGGAGGACGATGACCCTGATGACTCGGAGGTGATTTGCAGCTTCCTGGTGGCCCTG | | |
| | ATGCAGAAGAACCGGCGGAAGGACCGGAAGCTAGGGGCCAGTCTCTTCACCATTGGCTTCGCCATC | | |
| | TACGAGGTTCCCAAGAGATGCACGGGAACAAGCAGCACCTGCAGAAGGACTTCTTCCTGTACAAAC | | |
| | GCCTCCAAGGCCAGGAGCAAAACCTACATCAACATGCGGGAGGTGTCCCAGCCCTTCCGCCTGCCT | | |
| | CCCAGCGAGTACGTCATCGTGCCCTCCACCTACGAGCCCCACCAGGAGGGGGAATTCATCCTCCGG | | |
| | GTCTTCTCTGAAAAGAGGAACCTCTCTGAGGAAGTTGAAAATACCATCTCCGTGGATCGGCCAGTG | | |
| | AAAAAGAAAAAAACCAAGCCCATCATCTTCGTTTCGGACAGAGCAAACAGCAACAAGGAGCTGGGT | | |
| | GTGGACCAGGAGTCAGAGGAGGGCAAAGGCAAAACAAGCCCTGATAAGCAAAAGCAGTCCCCACAG | | |
| | CCACAGCCTGGCAGCTCTGATCAGGAAAGTGAGGAACAGCAACAATTCCGGAACATTTTCAAGCAG | | |
| | ATAGCAGGAGATGACATGGAGATCTGTGCAGATGAGCTCAAGAAGGTCCTTAACACAGTCGTGAAC | | |
| | AGACACAAGGACCTGAAGACACACGGGTTCACACTGGAGTCCTGCCGTAGCATGATTGCGCTCATG | | |
| | GATACAGATGGCTCTGGAAGCTCAACCTGCAGGAGTTCCACCACCTCTGGAACAAAGATTGGGACC | | |
| | TCGCAGAAAATTTTCAAACACTATGACACAGACCAGTCCGCCACCATCAACAGCTACGAGATGCGA | | |
| | AATGCAGTCAACGACGCAGGATTCCACCTCAACAACCAGCTCTATGACATCATTACCATGCGGTAC | | |
| | GCAGACAACACATGAACATCGACTTTGACAGTTTCATCTGCTGCTTCGTTAGGCTAAAAGGGCATG | | |
| | TTCAGAGCTTTTCATGCATTTGACAAGOATGGAGATGGTATCATCAAGCTCAACGTTCTGGAGTGG | | |
| | CTGCAGCTCACCATGTATGCCTGAAAA | | |
| | ORF Start: ATG at 1 | | ORF Stop: TGA at 2464 |
| | SEQ ID NO:124 | 821 aa | MW at 94252.7 kD |

| | |
|---|---|
| NOV23b, | MPTVISASVAPRTAAEPRSPGPVPHPAQSKATEAGGGNPSGIYSAIISRNFPIIGVKEKTFEQLHK |
| CG57509-02 | |
| Protein Sequence | KCLEKKVLYVDPEWPPDETSLFYSQKFPIQFVWKRPPEICENPRFIIDGANRTDICQGELGDCWFL |
| | AAIACLTLNQHLLFRVIPHDQSFIENYAGIFHFQFWRYGEWVDVVIDDCLPTYNNQLVFTKSWHRN |
| | EFWSALLEKAYAKLHGSYEALKGGNTTEAMEDFTGGVAEFFEIRDAPSDMYKIMKKAIERGSLMGC |
| | SIDDGTNNTYGTSPSGLNMGELIARMVRNNDNSLLQDSDLDPRGSDERPTRTIIPVQYETRMACGL |
| | VRGHYSVTGLDEVPFKGEKVKALVRLRNPWGQVEWNGSWSDRWKDWSFVDKDEKARLQHQVTEDGE |
| | FWMSYEDFIYHFTKLEICNLTADALQSDKLOTWTVSVNEGRWVRGCSAGGCRNFPDTFWTNPQYRL |
| | KLLEEDDDPDOSEVICSFLVALMOKNRRKDRKLGASLFTIGGAIYEVPKEMHGNKQHLQKDFFLYN |
| | ASKARSKTYINMREVSQRFRLPPSEYVIVPSTYEPHQEGEFILRVFSEKRNLSEEVENTISVDRPV |
| | KKKKTPHIIFVSDRANSNKELGVDQESEEGKGKTSPDKQKQSPQPQPGSSDQESEEQQQFRNIFKQ |
| | IAGDDMETCADELKKVLNTVVNRHKDLKTHCFTLESCRSMIALMDTDGSOGNLQEFHHLWNKIGKA |
| | WQKIFKHYDTDQSGTINSYEMRNAVNDAGFHLNNQLYDIITMRYADKHMNIDFDSFICCFVRLEGM |
| | FRAFHAFDKDGDGIIKLNVLEWLQLTMYA |

[0482] Sequence comparison of the above protein sequences yields the following sequence relationships shown in Table 23B.

TABLE 23B
Comparison of NOV23a against NOV23b.

| | | Identities/ |
|---|---|---|
| | | Similarities for |
| Protein | NOV23a Residues/ | the Matched |
| Sequence | Match Residues | Region |
| NOV23b | 1 . . . 773 | 773/821 (94%) |
| | 1 . . . 821 | 773/821 (94%) |

[0483] Further analysis of the NOV23a protein yielded the following properties shown in Table 23C.

TABLE 23C
Protein Sequence Properties NOV23a

| SignalP analysis: | Cleavage site between residues 16 and 17 | | | |
|---|---|---|---|---|
| PSORT II analysis: | PSG: a new signal peptide prediction method | | | |
| | N-region: length 0; pos. chg 0; neg. chg 0 | | | |
| | H-region: length 11; peak value 7.27 | | | |
| | PSG score: 2.87 | | | |
| | GvH: von Heijne's method for signal seq. recognition | | | |
| | GvH score (threshold: −2.1): −5.40 | | | |
| | possible cleavage site: between 15 and 16 | | | |
| | >>> Seems to have no N-terminal signal peptide | | | |
| | ALOM: Klein et al's method for TM region allocation | | | |
| | Init position for calculation: 1 | | | |
| | Tentative number of TMS(s) for the threshold 0.5: 0 | | | |
| | number of TMS(s) . . . fixed | | | |
| | PERIPHERAL Likelihood = 0.90 (at 130) | | | |
| | ALOM score: 0.90 (number of TMSs: 0) | | | |
| | MTOP: Prediction of membrane topology (Hartmann et al.) | | | |
| | Center position for calculation: 6 | | | |
| | Charge difference: 0.5 C(1.5)-N(1.0) | | | |
| | C > N: C-terminal side will be inside | | | |
| | >>>Caution: Inconsistent mtop result with signal peptide | | | |
| | MITDISC: discrimination of mitochondrial targeting seq | | | |
| | R content: | 1 | Hyd Moment(75): | 1.57 |
| | Hyd Moment(95): | 2.73 | G content: | 0 |
| | D/E content: | 1 | S/T content: | 4 |

Score: −3.90
Gavel: prediction of cleavage sites for mitochondrial preseq
R-2 motif at 59 SRN|FP
NUCDISC: discrimination of nuclear localization signals
pat4: KKKK (5) at 547
pat7: PVKKKKT (5) at 545
bipartite: none
content of basic residues: 12.4%
NLS Score: 0.27
KDEL: ER retention motif in the C-terminus: none
ER Membrane Retention Signals: none
SKL: peroxisomal targeting signal in the C-terminus: none
PTS2: 2nd peroxisomal targeting signal: none
VAC: possible vacuolar targeting motif: none
RNA-binding motif: none
Actinin-type actin-binding motif:
type 1: none
type 2: none
NMYR: N-myristoylation pattern: none
Prenylation motif: none
memYQRL: transport motif from cell surface to Golgi: none
Tyrosines in the tail: none
Dileucine motif in the tail: none
checking 63 PROSITE DNA binding motifs: none
checking 71 PROSITE ribosomal protein motifs: none
checking 33 PROSITE prokaryotic DNA binding motifs: none
NNCN: Reinhardt's method for Cytoplasmic/Nuclear
discrimination
Prediction: cytoplasmic
Reliability: 89
COIL: Lupas's algorithm to detect coiled-coil regions
total: 0 residues
Final Results (k = 9/23):
47.8%: cytoplasmic
26.1%: mitochondrial
21.7%: nuclear
4.3%: vacuolar
>> prediction for CG57509-01 is cyt (k = 23)

[0484] A search of the NOV23a protein against the Geneseq database, a proprietary database that contains sequences published in patents and patent publication, yielded several homologous proteins shown in Table 23D.

TABLE 23D
Geneseq Results for NOV23a

| | | | Identities/ | |
|---|---|---|---|---|
| | | | Similarities for | |
| Geneseq | Protein/Organism/Length | NOV23a Residues/ | the Matched | Expect |
| Identifier | [Patent #, Date] | Match Residues | Region | Value |
| AAE19164 | Human protease, PRTS-1 protein - | 1 . . . 773 | 766/773 (99%) | 0.0 |
| | Homo sapiens, 767 aa. | 1 . . . 767 | 766/773 (99%) | |
| | [WO200208396-A2, 31 JAN. 2002] | | | |
| AAR99579 | Calpain large subunit 1 - Homo | 1 . . . 773 | 773/821 (94%) | 0.0 |
| | sapiens, 821 aa. [WO9616175-A2, | 1 . . . 821 | 773/821 (94%) | |
| | 30 MAY 1996] | | | |
| AAY30342 | A calpain protein specific for eye | 61 . . . 773 | 613/765 (80%) | 0.0 |
| | tissue retina - Rattus sp, 757 aa. | 37 . . . 757 | 638/765 (83%) | |
| | [WO9945107-A1, 10 SEP. 1999] | | | |
| ABG26746 | Novel human diagnostic | 58 . . . 765 | 606/776 (78%) | 0.0 |
| | protein #26737 - Homo sapiens, 1069 aa. | 258 . . . 1005 | 619/776 (79%) | |
| | [WO200175067-A2, 11 OCT. 2001] | | | |
| AAE23085 | Calcium-activated neutral protease | 61 . . . 773 | 371/720 (51%) | 0.0 |
| | protein - Unidentified, 713 aa. | 42 . . . 713 | 504/720 (69%) | |
| | [WO200203787-A2, 17 JAN. 2002] | | | |

[0485] In a BLAST search of public sequence databases, the NOV23a protein was found to have homology to the proteins shown in the BLASTP data in Table 23E.

TABLE 23E
Public BLASTP Results for NOV23a

| | | | Identities/ | |
|---|---|---|---|---|
| Protein | | | Similarities for | |
| Accession | | NOV23a Residues/ | the Matched | Expect |
| Number | Protein/Organism/Length | Match Residues | Portion | Value |
| O08702 | Calpain Lp82 - Rattus norvegicus | 61 . . . 773 | 613/717 (85%) | 0.0 |
| | (Rat), 709 aa. | 37 . . . 709 | 638/717 (88%) | |
| O88977 | Calpain Lp82 - Mus musculus | 61 . . . 773 | 607/717 (84%) | 0.0 |
| | (Mouse), 709 aa. | 37 . . . 709 | 637/717 (88%) | |
| Q9XSJ3 | Lens-specific calpain Lp82 - | 61 . . . 773 | 601/717 (83%) | 0.0 |
| | Oryctolagus cuniculus (Rabbit), 709 | 37 . . . 709 | 634/717 (87%) | |
| | aa. | | | |
| Q9XSJ1 | Lens-specific calpain Lp82 - Bos | 61 . . . 773 | 602/717 (83%) | 0.0 |
| | taurus (Bovine), 709 aa. | 37 . . . 709 | 633/717 (87%) | |
| Q9XSJ2 | Lens-specific calpain Lp82 - Sus | 61 . . . 773 | 604/717 (84%) | 0.0 |
| | scrofa (Pig), 709 aa. | 37 . . . 709 | 633/717 (88%) | |

[0486] PFam analysis predicts that the NOV23a protein contains the domains shown in the Table 23F.

TABLE 23F
Domain Analysis of NOV23a

| | | Identities/ | |
|---|---|---|---|
| | NOV23a | Similarities for | |
| Pfam | Match | the Matched | Expect |
| Domain | Region | Region | Value |
| Peptidase_C2 | 74 . . . 369 | 198/344 (58%) | 7.2e−213 |
| | | 293/344 (85%) | |
| Calpain_III | 380 . . . 534 | 100/163 (61%) | 5.5e−107 |
| | | 147/163 (90%) | |
| efhand | 648 . . . 676 | 8/29 (28%) | 0.00023 |
| | | 25/29 (86%) | |
| efhand | 678 . . . 706 | 8/29 (28%) | 0.0005 |
| | | 24/29 (83%) | |

### Example 24.

[0487] The NOV24 clone was analyzed, and the nucleotide and encoded polypeptide sequences are shown in Table 24A.

TABLE 24A
NOV24 Sequence Analysis

| | SEQ ID NO:125 | 3071 bp | |
|---|---|---|---|
| NOV24a, | TTCCAGCCGCCAGGATGGAGGACGAGGAAGGCCCTGAGTATGGCACCTGACTTTGTGCTTTTGG | | |
| CG59522-02 | | | |
| DNA Sequence | ACCAAGTGACCATGGAGGACTTCATGAGGAACCTGCAGCTCAGGTTCGAGAAGGGCCGCATCTACA | | |
| | CCTACATCGGTGAGGTGCTGGTGTCCGTGAACCCCTACCAGGAGCTGCCCCTGTATGGGCCTGAGG | | |
| | CCATCGCCAGGTACCAGGGCCGTGAGCTCTATGAGCGGCCACCCCATCTCTATGCTGTGGCCAACG | | |
| | CCGCCTACAAGGCAATGAAGTACCGGTCCAGAACACCTGCATCGTAATCTCAGGGGAGAGTGGGGG | | |
| | CAGGGAAGACAGAAGCCAGTAAGCACATCATGCAGTACATCGCTGCTGTCACCAATCCAAGCCAGA | | |
| | GGGTGAGGTGGAGAGGGTCAGGACGTGCTGCTCAGTCCACCTGTGTGCTGGAACCTTTGGGGCAGA | | |
| | ATGCCCGCACCAACCGCAATCACAACTCCAGCCGCTTTGGCAAGTACATGGACATCAACTTTGACT | | |
| | TCAAGGGGGACCCGATCGGAGGACGCATCCACAGCTACCTACTGGAGAAGTCTCGGGTCCTCAAGC | | |
| | TCAAGGGGGACCCGATCGGAGGACGCATCCACAGCTACCTACTGGAGAAGTCTCGGGTCCTCAAGC | | |
| | AGCACGTGGGTGAAAGAAACTTCCACGCCTTCTACCAATTGCTGAGAGGCAGTGAGGACAAGCAGC | | |
| | TGCATGAACTGCACTTGGAGAGAAACCCTGCTGTATACAATTTCACACACCAGGGAGCAGGACTCA | | |
| | ACATGACTGTGCACAGTGCCTTGGACAGTGATGAGCAGAGCCACCAGGCAGTGACCGAGGCCATGA | | |
| | GGGTCATCGGCTTCAGTCCTGAAGAGGTGGAGTCTGTGCATCGCATCCTGGCTGCCATATTGCACC | | |
| | TGGGAAACATCGAGTTTGTGGAGACGGAGGAGGGTGGGCTGCAGAAGGAGGGCCTGGCAGTGGCCG | | |
| | AGGAGGCACTGGTGGACCATGTGGCTGAGCTGACGGCCACACCCCGGGACCTCGTGCTCCGCTCCC | | |
| | TGCTGGCTCGCACAGTTGCCTCGGGAGGCAGGGAACTCATAGAGAAGGGCCACACTGCAGCTGAGG | | |
| | CCAGCTATGCCCGGGATGCCTGTGCCAAGGCAGTGTACCAGCGGCTGTTTGAGTGGGTGGTGAACA | | |
| | GGATCAACAGTGTCATGGAACCCCGGGGCCGGGATCCTCGGCGTGATGGCAAGGACACAGTCATTG | | |
| | GCGTGCTGGACATCTATGGCTTCGAGGTGTTTCCCGTAACAGTTTCGAGAAGTTCTGCATCAAGCT | | |
| | ACTGCAATGAGAAGCTGCAGCAGCTATTCATCCAGCTCATCCTGGGGCAAACAGGAAGGGAGTACG | | |
| | AGCGCGAGGGCATCACCTGGCAGAGCGTTGAGTATTTCAACAACGCCACCATTGTGGATCTGGTGG | | |
| | AGCGGCCCCACCGTGGCATCCTGGCCGTGCTGGACGAGGCCTGCAGCTCTGCTGGCACCATCACTG | | |
| | ACCGAATCTTCCTGCAGACCCTCGACACGCACCACCGCCATCACCTACACTACACAAGCCGCCAGC | | |
| | TCTGCCCCACAGACAAGACCATGGAGTTTGGCCGAGACTTCCGGATCAAGCACTATGCAGGGGACG | | |
| | TCACGTACTCCGTGGAAGGCTTCATCGACAAGAACAGAGATTTCCTCTTCCAGGACTTCAAGCGGC | | |
| | TGCTGTACAACAGCACGGACCCCACTCTACGGGCCATGTGGCCGGACGGGCAGCAGGACATCACAG | | |
| | AGGTGACCAAGCGCCCCCTGACGGCTGGCACACTCTTCAAGAACTCCATGGTGGCCCTGGTGGAGA | | |
| | ACCTTGCCTCCAAGGAGCCCTTCTACGTCCGCTGCATCAAGCCCAATGAGGACAAGGTAGCTGGGA | | |
| | AGCTGGATGAGAACCACTGTCGCCACCAGGTCGCATACCTGGGGCTGCTGGAGAATGTGAGGGTCC | | |
| | GCAGGGCTGGCTTCGCTTCCCGCCAGCCCTACTCTCGATTCCTGCTCAGGTACAAGATGACCTGTG | | |
| | AATACACATGGCCCAACCACCTGCTGGGCTCCGACGGCAGCCGTGAGCGCTCTCCTAAGCGGGAGC | | |
| | ACGGGCTGCAGGGGGACGTGGCCTTTGGCCACAGCAAGCTGTTCATCCGCTCACCCCGGACACTGG | | |
| | TCACACTGGAGCAGAGCCGAGCCCGCCTCATCCCCATCATTGTGCTGCTATTGCAGAAGGCATGGC | | |
| | GGGGCACCTTGGCGAGGTGGCGCTGCCGGAGGCTGAGGGCTATCTACACCATCATGCGCTGGTTCC | | |
| | GGAGACACAAGGTGCGGGCTCACCTGGCTGAGCTGCAGCGGCGATTCCAGGCTGCAAAACAGCCGC | | |
| | CACTCTACGGGCGTGACCTTGTGTGGCCGCTGCCCCCTGCTGTGCTGCAGCCCTTCAAGACAGCCT | | |
| | GCCACGCACTCTTCTGCAGGTGGCGGGCCCGGCAGCTGGTGAAGAACATCCCCCCTTCAGACATGC | | |
| | CCCAGATCAAGGCCAAGGTGGCCGCCATGGGGGCCCTGCAAGGGCTTCGTCAGGACTGGGGCTGCC | | |
| | GACGGGCCTGGGCCCGAGACTACCTGTCCTCTGCCACTGACAATCCCACAGCATCAAGCCTGTTTG | | |
| | CTCAGCGACTAAAGACACTTCGGGACAAAGATGGCTTCGGGGCTGTGCTCTTTTCAAGCCATGTCC | | |
| | GCAAGGTGAACCGCTTCCACAAGATCCGGAACCGGGCCCTCCTGCTCACAGACCAGCACCTCTACA | | |
| | AGCTGGACCCTGACCGGCAGTACCGGGTGATGCGGGCCGTGCCCCTTGAGGCGGTGACGGGGCTGA | | |
| | GCGTGACCAGCGGAGGAGACCAGCTGGTGGTGCTGCACGCCCGCGGCCAGGACGACCTCGTGGTGT | | |
| | GCCTGCACCGCTCCCGGCCGCCATTGGACAACCGCGTTGGGGAGCTGGTGGGCGTGCTGGCCGCAC | | |
| | ACTGCCAGGGGGAGGGCCGCACCCTGGAGGTTCGCGTCTCCGACTGCATCCCACTAAGCCATCGCG | | |
| | GGGTCCGGCGCCTCATCTCCCTCGAGCCCAGGCCGGAGCAGCCAGAGCCCGATTTCCGCTGCGCTC | | |
| | GCGGCTCCTTCACCCTGCTCTGGCCCAGCCGCTGA | | |
| | ORF Start: ATG at 15 | | ORF Stop: TGA at 3069 |
| | SEQ ID NO:126 | 1018 aa | MW at 116483.8 kD |
| NOV24a, | MEDEEGPEYGKPDFVLLDQVTMEDFMRNLQLRFEKGRIYTYIGEVLVSVNPYQELPLYGPEAIARY | | |
| CG59522-02 | | | |
| Protein Sequence | QGRELYERPPHLYAVANAAYKAMKYRSRDTCIVISGESGAGKTEASKHIMQYIAAVTNPSQRAEVE | | |
| | RVKDVLLKSTCVLEAFGNARTNRNHNSSRFGKYMDINFDFKGDPIGGRIHSYLLEKSRVLKQHVGE | | |
| | RNFHAFYQLLRGSEDKQLHELHLERNPAVYNFTHQGAGLNMTVHSALDSDEQSHQAVTEAMRVIGF | | |
| | SPEEVESVHRILAAILHLGNIEFVETEEGGLQKEGLAVAEEALVDHVAELTATPRDLVLRSLLART | | |
| | VASGGRELIEKGHTAAEASYARDACAKAVYQRLFEWVVNRINSVMEPRGRDPRRDGKDTVIGVLDI | | |
| | YGFEVFPVNSFEQFCINYCNEKLQQLFIQLILKQEQEEYEREGITWQSVEYFNNATIVDLVERPHR | | |
| | GILAVLDEACSSAGTITDRIFLQTLDTHHRHHLHYTSRQLCPTDKTMEFGRDFRIKHYAGDVTYSV | | |
| | EGFIDKNRDFLFQDFKRLLYNSTDPTLRAMWPDGQQDITEVTKRPLTAGTLFKNSMVALVENLASK | | |
| | EPFYVRCIKPNEDKVAGKLDENHCRHQVAYLGLLENVRVRRAGFASRQPYSRFLLRYKMTCEYTWP | | |
| | NHLLGSDKAAVSALLEQHGLQGDVAFGHSKLFIRSPRTLVTLEQSRARLIPIIVLLLQKAWRGTLA | | |
| | RWRCRRLRAIYTIMRWFRRHKVRAHLAELQRRFQAARQPPLYGRDLVWPLPPAVLQPFQDTCHALF | | |
| | CRWRARQLVKNIPPSDMPQIKAKVAAMGALQGLRQDWGCRRAWARDYLSSATDNPTASSLFAQRLK | | |
| | TLRDKDGFGAVLFSSHVRKVNRFHKIRNRALLLTDQHLYKLDPDRQYRVMRAVPLEAVTGLSVTSG | | |
| | GDQLVVLHARGQDDLVVCLHRSRPPLDNRVGELVGVLAAHCQGEGRTLEVRVSDCIPLSHRGVRRL | | |
| | AISVEPRPEQPEPDFRCARGSFTLLWPSR | | |
| | SEQ ID NO:127 | 3080 bp | |
| NOV24b, | TTCCAGCCGGCAGGATGGAGGACGAGGAAGGCCCTGAGTATGGCAAACCTGACTTTGTGCTTTTGG | | |
| CG59522-01 | | | |
| DNA Sequence | ACCAAGTGACCATGGAGGACTTCATGAGGAACCTGCAGCTCAGGTTCGAGAAGGGCCGCATCTACA | | |
| | CCTACATCGGTGAGGTGCTGGTGTCCGTGAACCCCTACCAGGAGCTGCCCCTGTATGGGCCTGAGG | | |
| | CCATCGCCAGGTACCAGGGCCGTGAGCTCTATGAGCGGCCACCCCATCTCTATGCTGTGGCCAACG | | |
| | CCGCCTACAAGGCAATGAAGCACCGGTCCAGGGACACCTGCATCGTCATCTCAGGGGAGAGTGGAA | | |
| | CAGGGAAGACAGAAGCCAGTAAGCACATCATGCAGTACATCGCTGCTGTCACCAATCCAAGCCAGA | | |
| | GGGCTGAGGTGGAGAGGGTCAAGGACGTGCTGCTCAAGTCCACCTGTGTGCTGGAGGCCTTTGGCA | | |
| | ATGCCCGCACCAACCGCAATCACAACTCCAGCCGCTTTGGCAAGTACATGGACATCAACTTTGACT | | |
| | TCAAGGGGGACCCGATCGGAGGACACATCCACAGCTACCTACTGGAGAAGTCTCGGGTCCTCAAGC | | |
| | AGCACGTGGGTGAAAGAAACTTCCACGCCTTCTACCAATTGCTGAGAGGCAGTGAGGACAAGCAGC | | |
| | TGCATGAACTGCACTTGGAGAGAAACCCTGCTGTATACAATTTCACACACCAGGGAGCAGGACTCA | | |
| | ACATGACTGTGACTGATGAGCAGACCCACCAGGCAGTGACCGAGACCATGAGATCATCGGGCTTCA | | |
| | GTCCTGAAGAGGTGGAGTCTGTGCATCGCATCCTGGCTGCCATATTGCACCTGGGAAACATCGAGT | | |
| | TTGTGGAGACGGAGGAGGGTGGGCTGCAGAAGGAGGGCCTGGCAGTGGCCGAGGAGGCACTGGTGG | | |
| | ACCATGTGGCTGAGCTGACGGCCACACCCCGGGACCTCGTGCTCCGCTCCCTGCTOGCTCGCACAG | | |
| | TTGCCTCGGGAGGCAGGGAACTCATAGAGAAGGGCCACACTGCAGCTGAGGCCAGCTATGCCCGGG | | |
| | ATGCCTGTGCCAAGGCAGTGTACCAGCGGCTGTTTGAGTGGGTGGTGAACAGGATCAACAGTGTCA | | |
| | TGGAACCCCGGGGCCGGGATCCTCGGCGTGATGGCAAGGACACAGTCATTGGCGTGCTGGACATCT | | |
| | ATGGCTTCGAGGTGTTTCCCGTCAACAGTTTCGAGCAGTTCTGCATCAACTACTGCAACGAGAAGC | | |
| | TGCAGCAGCTATTCATCCAGCTCATCCTGAAGCAGGAACAGGAAGAGTACGAGCGCGAGGGCATCA | | |
| | CCTGGCAGAGCGTTGAGTATTTCAACAACGCCACCATTGTGGATCTGGTGGAGCGGCCCCACCGTG | | |
| | GCATCCTGGCCGTGCTGGACGAGGCCTGCAGCTCTGCTGGCACCATCACTGACCGAATCTTCCTGC | | |
| | AGACCCTGGACATGCACCACCGCCATCACCTACACTACACCAGCCGCCAGCTCTGCCCCACAGACA | | |
| | AGACCATGGAGTTTGGCCGAGACTTCCGGATCAAGCACTATGCAGGGGACGTCACGTACTCCGTGG | | |
| | AAGGCTTCATCGACAAGAACAGAGATTTCCTCTTCCAGGACTTCAAGCGGCTGCTGTACAACAGCA | | |
| | CGGACCCCACTCTACGGGCCATGTGGCCGGACGGGCAGCAGGACATCACAGAGGTGACCAAGCGCC | | |
| | CCCTGACGGCTGGCACACTCTTCAAGAACTCCATGGTGGCCCTGGTGGAGAACCTTGCCTCCAAGG | | |
| | AGCCCTTCTACGTCCGCTGCATCAAGCCCAATGAGGACAAGGTAGCTGGGAAGCTGGATGAGAACC | | |
| | ACTGTCGCCACCAGGTCGCATACCTGGGGCTGCTGGAGAATGTGAGGGTCCGCAGGGCTGGCTTCG | | |
| | CTTCCCGCCAGCCCTACTCTCGATTCCTGCTCAGGTACAAGATGACCTGTGAATACACATGGCCCA | | |
| | ACCACCTGCTGGGCTCCGACAAGGCAGCCGTGAGCGCTCTCCTGGAGCAGCACGGGCTGCAGAAAG | | |
| | ACGTGGCCTTTGGCCACAGCAAGCTGTTCATCCGCTCACCCCGGACACTGGTCACACTGGAGCAGA | | |
| | GCCGAGCCCGCCTCATCCCCATCATTGTGCTGCTATTGCAGAAGGCATGGCGGGGCACCTTGGCGA | | |
| | GGTGGCGCTGCCGGAGGCTGAGGGCTATCTACACCATCATGCGCTGGTTCCGGAGACACGGAATGC | | |
| | GGGCTCACCTGGCTGAGCTGCAGCGGCGATTCCAGGCTGCAAGGCAGCCGCCACTCTACGGGCGTG | | |
| | ACCTTGTGTGGCCGCTGCCCCCTGCTGTGCTGCAGCCCTTCCAGGACACCTGCCACGCACTCTTCT | | |
| | GCAGGTGGCGGGCCCGGCAGCTGGTGAAGAACATCCCCCCTTCAGACATGCCCCAGATCAAGGCCA | | |
| | AGGTGGCCGCCATGGGGGCCCTGCAAGGGCTTCGTCAGGACTGGGGCTGCCGACGGGCCTGGGCCC | | |
| | GAGACTACCTGTCCTCTGCCACTGACAATCCCACAGCATCAAGCCTGTTTGCTCAGCGACTAAAGA | | |
| | CACTTCAGGACAAAGATGGCTTCGGGGCTGTGCTCTTTTCAAGCCATGTCCGCAAGGTGAACCGCT | | |
| | TCCACAAGATCCGGAACCGGGCCCTCCTGCTCACAGACCAGCACCTCTACAAGCTGGACCCTGACC | | |
| | GGCAGTACCGGGTGTGCGGGCCGTGCCCCTTGAGGCGGTGACGGGGCTGAGCGTGACCAGCGGGAG | | |
| | GAGACCAGCTGGTGGTGCTGCACGCCCGCGGCCAGGACGACCTCGTGGTGTGCCTGCACCGCTCCC | | |
| | GGCCGCCATTGGACAACCGCGTTGGGGACCTGGTGGGCGTGCTGGCCGCACACTGCCGCAGGGAAC | | |
| | GCCGCACCCTGGAGGTTCGCGTCTCCGACTGCATCCCACTCGCCATCGCGGGGTCCGGCGCGCTCA | | |
| | TCTCCGTGGAGCCCAGGCCGGAGCAGCCAGAGCCCGATTTCCGCTGCGCTCGCGGCTCCTTCACCC | | |
| | TGCTCTGGCCCAGCCGCTGAGCGCCCGCACCCGCCGCACCCCGA | | |
| | ORF Start: ATG at 15 | | ORF Stop: at 3054 |
| | SEQ ID NO:128 | 1013 aa | MW at 116044.5 kD |

| | |
|---|---|
| NOV24b, | MEDEEGPEYGKPDFVLLDQVTMEDFMRNLQLRFEKGRIYTYIGEVLVSVNPYQELPLYGPEAIARY |
| CG59522-01 | |
| Protein Sequence | QGRELYERPPHLYAVANAAYKAMKHRSRDTCIVISGESCAGKTEASHIMQYIAAVTNPQRAEVEVE |
| | RVKDVLLKSTCVLEAFGNARTNRNHNSSRFGKYMDINFDFKGDPIGGHIHSYLLEKSRVLKQHVGE |
| | RNFHAFYQLLRGSEDKQLHELHLERNPAVYNFTHQGAGLNMTVSDEQSHQAVTEAMRVIGFSPEEV |
| | ESVHRILAAILHLGNIEFVETEEGGLQKEGLAVAEEALVDHVAELTATPRDLVRSLLARRTVASGG |
| | RELIEKGHTAAEASYARDACAKAVYQRLFEWVVNRINSVMEPRGRDPRRDGKDTVIGVLDIYGFEV |
| | FPVNSFEQFCINYCNEKLQQLFIQLILKQEQEEYEREGITWQSVEYFNNATIVDLVERPHRGILAV |
| | LDEACSSAGTITDRIFLQTLDMHHRHHLHYTSRQLCPTDKTMEFGRDFRIKHYAGDVTYSVEGFID |
| | KNRDFLFQDFKRLLYNSTDPTLRAMWPDGQQDITEVTKRPLTAGTLFKNSMVALVENLASKEPFYV |
| | RCIKPNEDKVAGKLDENHCRHQVAYLGLLENVRVRRAGFASRQPYSRFLLRYKMTCEYTWPNHLLG |
| | SDKAAVSALLEQHGLQGDVAFGHSKLFIRSPRTLVTLEQSRARLIPIIVLLLQKAWRGTLARWRCR |
| | RLRAIYTIMRWFRRHKVRAHLAELQRRFQAARQPPLYGRDLVWPLPPAVLQPFQDTCHALFCRWRA |
| | RQLVKNIPPSDMPQIKAKVAAMGALQGLRQDWGCRRAWARDYLSSATDNPTQSLFAQRLPKTLQDK |
| | DGFGAVLFSSHVRKVNRFHKIRNRALLLTDQHLYKLDPDRQYRVMRAVPLEAVTGLSVTSGGDQLV |
| | VLHARGQDDLVVCLHRSRPPLDNRVGELVGVLAAHCRREGRTLEVRVSDCIPLSHRGVRRLISVEP |
| | RPEQPEPDFRCARGSFTLLWPSR |

[0488] Sequence comparison of the above protein sequences yields the following sequence relationships shown in Table 24B.

TABLE 24B
Comparison of NOV24a against NOV24b.

| Protein | NOV24a Residues/ | Identities/Similarities |
|---|---|---|
| Sequence | Match Residues | for the Matched Region |
| NOV24b | 1 . . . 1018 | 1007/1018 (98%) |
| | 1 . . . 1013 | 1010/1018 (98%) |

[0489] Further analysis of the NOV24a protein yielded the following properties shown in Table 24C.

TABLE 24C
Protein Sequence Properties NOV24a

| SignalP | No Known Signal Sequence Predicted | | | |
|---|---|---|---|---|
| analysis: | | | | |
| PSORT II | PSG: a new signal peptide prediction method | | | |
| analysis: | N-region: length 11; pos. chg 1; neg. chg 5 | | | |
| | H-region: length 1; peak value 0.00 | | | |
| | PSG score: −4.40 | | | |
| | GvH: von Heijne's method for signal seq. recognition | | | |
| | GvH score (threshold: −2.1): −14.99 | | | |
| | possible cleavage site: between 26 and 27 | | | |
| | >>> Seems to have no N-terminal signal peptide | | | |
| | ALOM: Klein et al's method for TM region allocation | | | |
| | Init position for calculation: 1 | | | |
| | Tentative number of TMS(s) for the threshold 0.5: 0 | | | |
| | number of TMS(s) . . . fixed | | | |
| | PERIPHERAL Likelihood = 2.07 (at 709) | | | |
| | ALOM score: 2.07 (number of TMSs: 0) | | | |
| | MITDISC: discrimination of mitochondrial targeting seq | | | |
| | R content: | 0 | Hyd Moment(75): | 8.14 |
| | Hyd Moment (95): | 7.70 | G content: | 0 |
| | D/E content: | 2 | S/T content: | 0 |

Score: −6.58
Gavel: prediction of cleavage sites for mitochondrial preseq
cleavage site motif not found
NUCDISC: discrimination of nuclear localization signals
pat4: RRHK (3) at 744
pat7: none
bipartite: RRLRAIYTIMRWFRRHK at 731
content of basic residues: 13.8%
NLS Score: 0.21
KDEL: ER retention motif in the C-terminus: none
ER Membrane Retention Signals: none
SKL: peroxisomal targeting signal in the C-terminus: none
PTS2: 2nd peroxisomal targeting signal: found
RILAAILHL at 274
KLQQLFIQL at 418
VAC: possible vacuolar targeting motif: none
RNA-binding motif: none
Actinin-type actin-binding motif:
type 1: none
type 2: none
NMYR: N-myristoylation pattern: none
Prenylation motif: none
memYQRL: transport motif from cell surface to Golgi: none
Tyrosines in the tail: none
Dileucine motif in the tail: none
checking 63 PROSITE DNA binding motifs:
Leucine zipper pattern (PS00029): *** found ***
LAVAEEALVDHVAELTATPRDL at 300
none
checking 71 PROSITE ribosomal protein motifs: none
checking 33 PROSITE prokaryotic DNA binding motifs: none
NNCN: Reinhardt's method for Cytoplasmic/Nuclear
discrimination
Prediction: cytoplasmic
Reliability: 89
COIL: Lupas's algorithm to detect coiled-coil regions
total: 0 residues
Final Results (k = 9/23):
43.5%: nuclear
34.8%: cytoplasmic
17.4%: mitochondrial
4.3%: endoplasmic reticulum
>> prediction for CG59522-02 is nuc (k = 23)

[0490] A search of the NOV24a protein against the Geneseq database, a proprietary database that contains sequences published in patents and patent publication, yielded several homologous proteins shown in Table 24D.

TABLE 24D
Geneseq Results for NOV24a

| | | NOV24a | Identities/ | |
|---|---|---|---|---|
| | | Residues/ | Similarities | |
| Geneseq | Protein/Organism/Length [Patent | Match | for the | Expect |
| Identifier | #, Date] | Residues | Matched Region | Value |
| AAU23125 | Novel human enzyme polypeptide | 1 . . . 1018 | 1016/1018 (99%) | 0.0 |
| | #211 - Homo sapiens, 1026 aa. | 9 . . . 1026 | 1017/1018 (99%) | |
| | [WO200155301-A2, 02 AUG. 2001] | | | |
| AAU23128 | Novel human enzyme polypeptide | 1 . . . 858 | 855/858 (99%) | 0.0 |
| | #214 - Homo sapiens, 909 aa. | 9 . . . 866 | 856/858 (99%) | |
| | [WO200155301-A2, 02 AUG. 2001] | | | |
| ABB71113 | Drosophila melanogaster | 8 . . . 1017 | 501/1018 (49%) | 0.0 |
| | polypeptide SEQ ID NO 40131 - | 6 . . . 1007 | 682/1018 (66%) | |
| | Drosophila melanogaster, 1011 aa. | | | |
| | [WO200171042-A2, 27 SEP. 2001] | | | |
| AAM80123 | Human protein SEQ ID NO 3769 - | 248 . . . 1016 | 438/769 (56%) | 0.0 |
| | Homo sapiens, 764 aa. | 1 . . . 762 | 571/769 (73%) | |
| | [WO200157190-A2, 09 AUG. 2001] | | | |
| AAM79139 | Human protein SEQ ID NO 1801 - | 259 . . . 1016 | 434/758 (57%) | 0.0 |
| | Homo sapiens, 753 aa. | 1 . . . 751 | 565/758 (74%) | |
| | [WO200157190-A2, 09 AUG. 2001] | | | |

[0491] In a BLAST search of public sequence databases, the NOV24a protein was found to have homology to the proteins shown in the BLASTP data in Table 24E.

TABLE 24E
Public BLASTP Results for NOV24a

| | | NOV24a | Identities/ | |
|---|---|---|---|---|
| Protein | | Residues/ | Similarities | |
| Accession | | Match | for the | Expect |
| Number | Protein/Organism/Length | Residues | Matched Portion | Value |
| Q96RI6 | Unconventional myosin 1G valine | 33 . . . 651 | 616/619 (99%) | 0.0 |
| | form - Homo sapiens (Human), 633 | 1 . . . 619 | 617/619 (99%) | |
| | aa (fragment). | | | |
| Q96RI5 | Unconventional myosin 1G | 33 . . . 651 | 615/619 (99%) | 0.0 |
| | methonine form - Homo sapiens | 1 . . . 619 | 617/619 (99%) | |
| | (Human), 633 aa (fragment). | | | |
| Q63357 | Myosin Id (Myosin heavy chain myr | 1 . . . 1016 | 605/1016 (59%) | 0.0 |
| | 4) - Rattus norvegicus (Rat), 1006 aa. | 1 . . . 1004 | 781/1016 (76%) | |
| A53933 | myosin I myr 4 - rat, 1006 aa. | 1 . . . 1016 | 603/1016 (59%) | 0.0 |
| | | 1 . . . 1004 | 779/1016 (76%) | |
| Q23978 | Myosin IA (MIA) (Brush border | 8 . . . 1017 | 501/1018 (49%) | 0.0 |
| | myosin IA) (BBMIA) - Drosophila | 6 . . . 1007 | 682/1018 (66%) | |
| | melanogaster (Fruit fly), 1011 aa. | | | |

[0492] PFam analysis predicts that the NOV24a protein contains the domains shown in the Table 24F.

TABLE 24F
Domain Analysis of NOV24a

| | NOV24a | Identities/Similarities | Expect |
|---|---|---|---|
| Pfam Domain | Match Region | for the Matched Region | Value |
| myosin_head | 11 . . . 694 | 308/747 (41%) | 1.8e−285 |
| | | 532/747 (71%) | |

### Example 25.

[0493] The NOV25 clone was analyzed, and the nucleotide and encoded polypeptide sequences are shown in Table 25A.

TABLE 25A
NOV25 Sequence Analysis

| | SEQ NO:129 | 1187 bp | |
|---|---|---|---|
| NOV25a, | GGCAGAGTTCCTCTATCTCGTCTTGTTGTGGCAGAGTTCCTCTATCTCGTCTTGTTGCTGATTAAA | | |
| CG90474-02 | | | |
| DNA Sequence | GGTGCCCCTGTCTCCAGTTTTTCTCCATCTCCTCGGACGTAGCAGCATCATGGTTGGG | | |
| | TTCAAGGCCACAGATGTGCCCCCTACTGCCACTGTGAAGTTTCTTAAGGCTGGCACAGCTGCCTGC | | |
| | ATCGCAGATCTCATCACCTTTCCTCTGGATACTGCTAAAGTCCGGTTACAGATCCAAGGAGAAAGT | | |
| | CAGGGGCCAGTGCGCGCTACAGCCAGCGCCCATCACACCGCGGTACTACCGCTGGACTGTAGCGCG | | |
| | CAGTACCGCGGTGTGATGGGCACCATTCTGACCATGGTGCGTACTGAGGGCCCCCGAAGCCTCTAC | | |
| | AATGGGCTGGTTGCCGGCCTGCAGCGCCAAATGAGCTTGCCTCTGTCCGCATCGGGCCTGTATGAT | | |
| | TCTGTCAAACAGTTCTACACCAAGGGCTCTGAGCATGCCAGCATTGGGAGCCGCCTCCTAGCAGGC | | |
| | AGCACCACAGGTGCCCTGGCTGTGGCTGTCGCCCAGCCCACGGATGTGGTAAAGGTCCGATTCCCC | | |
| | GCTCAGGCCCGGGCTGGAGGTGGTCGGAGATACCAAAGCACCGTCAATGCCTACAAGACCATTGCC | | |
| | CGAGAGGAAGGGTTCCGGGGCCTCTGGAAAGGGACCTCTCCCAATGTTGCTCGTAATGCCATTGTC | | |
| | AACTGTGCTGAGCTGGTGACCTATGACCTCATCATCAAGGATGCTCTGAAAGCCAACCTCATGACA | | |
| | GATGACCTCCCTTGCCACTTCACTTCTGCCTTTGGGCAGGCTTCTGAAACCACTGTCATCGCCTCC | | |
| | CCTGTAGACGTGGTCAAGACGAGATACATGAACTCTGCCCTGGGCCAGTACAGTAGCGCTGGCCAC | | |
| | TGTGCCCTTACCATGCTCCAGAAGGAGGGGCCCCGAGCCTTCTACAAAGGGTTCATGCCCTCCTTT | | |
| | CTCCGCTTGGGTTCCTGGAACGTGGTGATGTTCGTCACCTATGAGCAGCTGAAACGAGCCCTCATG | | |
| | GCTGCCTGCACTTCCCGAGAGGCTCCCTTCTGAGCCTCTCCTGCTGCTGACCTGATCACCTCTAAC | | |
| | TTTGTCTCTAGCCGGCGCCATGCTTTCCTTTTCTTCCTTCTTTCTCTTCCCTCCTTCCCTTCTCTC | | |
| | ORF Start: ATG at 124 | | ORF Stop: TGA at 1087 |
| | SEQ ID NO:130 | 321 aa | MW at 34334.3 kD |
| NOV25a, | MVGFKATDVPPTATVKFLGAGTAACIADLITFPLDTAKVRLQIQGESQGPVRATASAHHTAVLGAG | | |
| CG90474-02 | | | |
| Protein Sequence | CSAQYRGVMGTILTMRTEGPRSLYNGLVAGLQRQMSFASVRIGLYDSVKQGFYTKGSEHASIGSRL | | |
| | LAGSTTGALAVAVAQPTDVVKVRFQAQARAGGGRRYQSTVNAYKTIAREEGFRGLWKGTSPNVARN | | |
| | AIVNCAELVTYDLIKDALLKANLMTDDLPCHFTSAFGAGFCTTVIASPVDVVKTRYMNSALGQYSS | | |
| | AGHCALTMLQKEGPRAFYKGFMPSFLRLGSWNVVMFVTYEQLKRALMAACTSREAPF | | |
| | SEQ ID NO:131 | 960 bp | |
| NOV25b, | AGGAAATCAGCATCATGGTTGGGTTCAAGGCCACAGATGTGCCCCCTACTGCCACTGTGAAGTTTC | | |
| CG90474-01 | | | |
| DNA Sequence | TTGGGGCTGGCACAGCTGCCTGCATCGCAGATCTCATCACCTTTCCTCTGGATACTGCTAAAGTCC | | |
| | GGTTACAGATCCAAGGAGAAAGTCAGGGGCCAGTGCGCGCTACAGCCAGCGCCCAGTACCGCGGTG | | |
| | TGATGGGCACCATTCTGACCATGGTGCGTACTGAGGGCCCCCGAAGCCTCTACAATGGGCTGGTTG | | |
| | CCGGCCTGCAGCGCCAAATGAGCTTTGCCTCTGTCCGCATCGGCCTGTATGATTCTGTCAGGCAGT | | |
| | TCTACACCAAGGGCTCTGAGCATGCCAGCATTGGGAGCCGCCTCCTAGAAGGCAGCACCACAGGTG | | |
| | CCTGGCTGTGGCTGTGGCCCAGCCCACGGATGTGGTAAAGGTCCGATTCCAAGCTCAGGCCCGGGG | | |
| | CTGGAGGTGGTCGGAGATACCAAAGCACCGTCAATGCCTACAAGACCATTGCCCGAGAGGAAGGGT | | |
| | TCCGGGGCCTCTGGAAAGGGACCTCTCCCAATGTTGCTCGTAATGCCATTGTCAACTGTGCTGAGC | | |
| | TGGTGACCTATGACCTCATCAAGGATGCCCTCCTGAAAGCCAACCTCATGACAGATGACCTCCCTT | | |
| | GCCACTTCACTTCTGCCTTTGGGGCAGGCTTCTGCACCACTGTCATCGCCTCCCCTGTACACGTGG | | |
| | TCAAGACGAGATACATGAACTCTGCCCTGGGCCAGTACAGTAGCGCTGGCCACTGTGCCCTTACCA | | |
| | TGCTCCAGAAGGAOGGCCCCGAGCCTTCTACAAAGGGTTCATGCCCTCCTTTCTCCGCTTGAAATT | | |
| | CCTGGAACGTGGTGATGTTCGTCACCTATGAGCAGCTGAAACGAGCCCTCATGGCTGCCTGCACTT | | |
| | CCCGAGAGGCTCCCTTCTGAGCCTCTCCTCCTGCTG | | |
| | ORF Start: ATG at 15 | | ORF Stop: TGA at 942 |
| | SEQ ID NO:132 | 309 aa | MW at 33229.0 kD |

| | |
|---|---|
| NOV25b, | MVGFKATDVPPTATVKFLGAGTAACIADLITFPLDTAKVRLQIQGESQGPVRATASAQYRGVMGTI |
| CG90474-01 | |
| Protein Sequence | LTMVRTEGPRSLYNGLVAGLQRQMSFASVRIGLYDSVKQFYTKGSEHASISGSRLLAGTTGALAVA |
| | VAQPTDVVKVRFQAQARAGGGRRYQSTVNAYKTIAREEGFGLWKGTSPNVARNAIVNCAELTVTYD |
| | LIKDALLKANLMTDDLPCHFTSAFGAGFCTTVIASPVDVVKTRYMNSALGQYSSAGHCALTMLQKE |
| | IGPRAFYKGFMPSFLRLGSWNVVMFVTYEQLKRALMAACTSREAPF |

[0494] Sequence comparison of the above protein sequences yields the following sequence relationships shown in Table 25B.

TABLE 25B
Comparison of NOV25a against NOV25b.

| Protein | NOV25a Residues/ | Identities/Similarities |
|---|---|---|
| Sequence | Match Residues | for the Matched Region |
| NOV25b | 1 . . . 321 | 309/321 (96%) |
| | 1 . . . 309 | 309/321 (96%) |

[0495] Further analysis of the NOV25a protein yielded the following properties shown in Table 25C.

TABLE 25C
Protein Sequence Properties NOV25a

| SignalP | No Known Signal Sequence Predicted | | | |
|---|---|---|---|---|
| analysis: | | | | |
| PSORT II | PSG: a new signal peptide prediction method | | | |
| analysis: | N-region: length 8; pos. chg 1; neg. chg 1 | | | |
| | H-region: length 7; peak value 0.01 | | | |
| | PSG score: −4.39 | | | |
| | GvH: von Heijne's method for signal seq. recognition | | | |
| | GvH score (threshold: −2.1): −7.32 | | | |
| | possible cleavage site: between 27 and 28 | | | |
| | >>> Seems to have no N-terminal signal peptide | | | |
| | ALOM: Klein et al's method for TM region allocation | | | |
| | Init position for calculation: 1 | | | |
| | Tentative number of TMS(s) for the threshold 0.5: 0 | | | |
| | number of TMS(s) . . . fixed | | | |
| | PERIPHERAL Likelihood = 0.69 (at 18) | | | |
| | ALOM score: 0.69 (number of TMSs: 0) | | | |
| | MITDISC: discrimination of mitochondrial targeting seq | | | |
| | R content: | 0 | Hyd Moment(75): | 5.13 |
| | Hyd Moment(95): | 6.71 | G content: | 3 |
| | D/E content: | 2 | S/T content: | 4 |

Score: −7.33
Gavel: prediction of cleavage sites for mitochondrial preseq
cleavage site motif not found
NUCDISC: discrimination of nuclear localization signals
pat4: none
pat7: none
bipartite: none
content of basic residues: 10.6%
NLS Score: −0.47
KDEL: ER retention motif in the C-terminus: none
ER Membrane Retention Signals: none
SKL: peroxisomal targeting signal in the C-terminus: none
PTS2 : 2nd peroxisomal targeting signal: none
VAC: possible vacuolar targeting motif: none
RNA-binding motif: none
Actinin-type actin-binding motif:
type 1: none
type 2: none
NMYR: N-myristoylation pattern : none
Prenylation motif: none
memYQRL: transport motif from cell surface to Golgi: none
Tyrosines in the tail: none
Dileucine motif in the tail: none
checking 63 PROSITE DNA binding motifs: none
checking 71 PROSITE ribosomal protein motifs: none
checking 33 PROSITE prokaryotic DNA binding motifs: none
NNCN: Reinhardt's method for Cytoplasmic/Nuclear
discrimination
Prediction: cytoplasmic
Reliability: 94.1
COIL: Lupas's algorithm to detect coiled-coil regions
total: 0 residues
Final Results (k = 9/23):
47.8%: cytoplasmic
26.1%: mitochondrial
26.1%: nuclear
>> prediction for CG90474-02 is cyt (k = 23)

[0496] A search of the NOV25a protein against the Geneseq database, a proprietary database that contains sequences published in patents and patent publication, yielded several homologous proteins shown in Table 25D.

TABLE 25D
Geneseq Results for NOV25a

| | | NOV25a | Identities/ | |
|---|---|---|---|---|
| | | Residues/ | Similarities | |
| Geneseq | Protein/Organism/Length [Patent | Match | for the | Expect |
| Identifier | #, Date] | Residues | Matched Region | Value |
| AAY72342 | Human uncoupling protein, UCP-2 - | 1 . . . 321 | 309/321 (96%) | e−174 |
| | Homo sapiens, 309 aa. | 1 . . . 309 | 309/321 (96%) | |
| | [WO200078941-A2, 28 DEC. 2000] | | | |
| AAU09077 | Human uncoupling protein, UCP-2 - | 1 . . . 321 | 309/321 (96%) | e−174 |
| | Homo sapiens, 314 aa. | 6 . . . 314 | 309/321 (96%) | |
| | [WO200175131-A2, 11 OCT. 2001] | | | |
| AAY44292 | Human uncoupling protein-2 - Homo | 1 . . . 321 | 309/321 (96%) | e−174 |
| | sapiens, 309 aa. [WO9953953-A2, | 1 . . . 309 | 309/321 (96%) | |
| | 28 OCT. 1999] | | | |
| AAY45002 | Tularik human uncoupling protein-2 - | 1 . . . 321 | 309/321 (96%) | e−174 |
| | Homo sapiens, 309 aa. | 1 . . . 309 | 309/321 (96%) | |
| | [WO200006087-A2, 10 FEB. 2000] | | | |
| AAY28351 | UCP2 amino acid sequence - Homo | 1 . . . 321 | 309/321 (96%) | e−174 |
| | sapiens, 309 aa. [WO9937812-A1, | 1 . . . 309 | 309/321 (96%) | |
| | 29 JUL. 1999] | | | |

[0497] In a BLAST search of public sequence databases, the NOV25a protein was found to have homology to the proteins shown in the BLASTP data in Table 25E.

TABLE 25E
Public BLASTP Results for NOV25a

| | | NOV25a | Identities/ | |
|---|---|---|---|---|
| Protein | | Residues/ | Similarities | |
| Accession | | Match | for the | Expect |
| Number | Protein/Organism/Length | Residues | Matched Portion | Value |
| P55851 | Mitochondrial uncoupling protein 2 | 1 . . . 321 | 309/321 (96%) | e−173 |
| | (UCP 2) (UCPH) - Homo sapiens | 1 . . . 309 | 309/321 (96%) | |
| | (Human), 309 aa. | | | |
| Q9N2J1 | Mitochondrial uncoupling protein 2 | 1 . . . 321 | 301/321 (93%) | e−168 |
| | (UCP 2) - Canis familiaris (Dog), 309 | 1 . . . 309 | 304/321 (93%) | |
| | aa. | | | |
| Q9R246 | Uncoupling protein 2 - Mus musculus | 1 . . . 321 | 298/321 (92%) | e−166 |
| | (Mouse), 309 aa. | 1 . . . 309 | 300/321 (92%) | |
| P70406 | Mitochondrial uncoupling protein 2 | 1 . . . 321 | 297/321 (92%) | e−165 |
| | (UCP 2) (UCPH) - Mus musculus | 1 . . . 309 | 299/321 (92%) | |
| | (Mouse), 309 aa. | | | |
| Q9ER17 | Uncoupling protein 2 - Phodopus | 1 . . . 321 | 294/321 (91%) | e−164 |
| | sungorus (Striped hairy-footed | 1 . . . 309 | 298/321 (92%) | |
| | hamster) (Djungarian hamster), 309 | | | |
| | aa. | | | |

[0498] PFam analysis predicts that the NOV25a protein contains the domains shown in the Table 25F.

TABLE 25F
Domain Analysis of NOV25a

| | NOV25a | Identities/Similarities | Expect |
|---|---|---|---|
| Pfam Domain | Match Region | for the Matched Region | Value |
| mito_carr | 12 . . . 125 | 34/127 (27%) | 2.6e−28 |
| | | 94/127 (74%) | |
| mito_carr | 127 . . . 222 | 39/125 (31%) | 1.7e−30 |
| | | 83/125 (66%) | |
| mito_carr | 225 . . . 316 | 27/125 (22%) | 3.1e−26 |
| | | 73/125 (58%) | |

### Example B

### Sequencing Methodology and Identification of NOVX Clones

[0499] 1. GeneCalling™ Technology: This is a proprietary method of performing differential gene expression profiling between two or more samples developed at CuraGen and described by Shimkets, et al., “Gene expression analysis by transcript profiling coupled to a gene database query” Nature Biotechnology 17:198-803 (1999). cDNA was derived from various human samples representing multiple tissue types, normal and diseased states, physiological states, and developmental states from different donors. Samples were obtained as whole tissue, primary cells or tissue cultured primary cells or cell lines. Cells and cell lines may have been treated with biological or chemical agents that regulate gene expression, for example, growth factors, chemokines or steroids. The cDNA thus derived was then digested with up to as many as 120 pairs of restriction enzymes and pairs of linker-adaptors specific for each pair of restriction enzymes were ligated to the appropriate end. The restriction digestion generates a mixture of unique cDNA gene fragments. Limited PCR amplification is performed with primers homologous to the linker adapter sequence where one primer is biotinylated and the other is fluorescently labeled. The doubly labeled material is isolated and the fluorescently labeled single strand is resolved by capillary gel electrophoresis. A computer algorithm compares the electropherograms from an experimental and control group for each of the restriction digestions. This and additional sequence-derived information is used to predict the identity of each differentially expressed gene fragment using a variety of genetic databases. The identity of the gene fragment is confirmed by additional, gene-specific competitive PCR or by isolation and sequencing of the gene fragment.

[0500] 2. SeqCalling™ Technology: cDNA was derived from various human samples representing multiple tissue types, normal and diseased states, physiological states, and developmental states from different donors. Samples were obtained as whole tissue, primary cells or tissue cultured primary cells or cell lines. Cells and cell lines may have been treated with biological or chemical agents that regulate gene expression, for example, growth factors, chemokines or steroids. The cDNA thus derived was then sequenced using CuraGen's proprietary SeqCalling technology. Sequence traces were evaluated manually and edited for corrections if appropriate. cDNA sequences from all samples were assembled together, sometimes including public human sequences, using bioinformatic programs to produce a consensus sequence for each assembly. Each assembly is included in CuraGen Corporation's database. Sequences were included as components for assembly when the extent of identity with another component was at least 95% over 50 bp. Each assembly represents a gene or portion thereof and includes information on variants, such as splice forms single nucleotide polymorphisms (SNPs), insertions, deletions and other sequence variations.

[0501] 3. PathCalling™ Technology: The NOVX nucleic acid sequences are derived by laboratory screening of cDNA library by the two-hybrid approach. cDNA fragments covering either the full length of the DNA sequence, or part of the sequence, or both, are sequenced. In silico prediction was based on sequences available in CuraGen Corporation's proprietary sequence databases or in the public human sequence databases, and provided either the full length DNA sequence, or some portion thereof.

[0502] The laboratory screening was performed using the methods summarized below:

[0503] cDNA libraries were derived from various human samples representing multiple tissue types, normal and diseased states, physiological states, and developmental states from different donors. Samples were obtained as whole tissue, primary cells or tissue cultured primary cells or cell lines. Cells and cell lines may have been treated with biological or chemical agents that regulate gene expression, for example, growth factors, chemokines or steroids. The cDNA thus derived was then directionally cloned into the appropriate two-hybrid vector (Gal4-activation domain (Gal4-AD) fusion). Such cDNA libraries as well as commercially available cDNA libraries from Clontech (Palo Alto, Calif.) were then transferred from E. coli into a CuraGen Corporation proprietary yeast strain (disclosed in U.S. Pat. Nos. 6,057,101 and 6,083,693, incorporated herein by reference in their entireties).

[0504] Gal4-binding domain (Gal4-BD) fusions of a CuraGen Corportion proprietary library of human sequences was used to screen multiple Gal4-AD fusion cDNA libraries resulting in the selection of yeast hybrid diploids in each of which the Gal4-AD fusion contains an individual cDNA. Each sample was amplified using the polymerase chain reaction (PCR) using non-specific primers at the cDNA insert boundaries. Such PCR product was sequenced; sequence traces were evaluated manually and edited for corrections if appropriate. cDNA sequences from all samples were assembled together, sometimes including public human sequences, using bioinformatic programs to produce a consensus sequence for each assembly. Each assembly is included in CuraGen Corporation's database. Sequences were included as components for assembly when the extent of identity with another component was at least 95% over 50 bp. Each assembly represents a gene or portion thereof and includes information on variants, such as splice forms single nucleotide polymorphisms (SNPs), insertions, deletions and other sequence variations.

[0505] Physical clone: the cDNA fragment derived by the screening procedure, covering the entire open reading frame is, as a recombinant DNA, cloned into pACT2 plasmid (Clontech) used to make the cDNA library. The recombinant plasmid is inserted into the host and selected by the yeast hybrid diploid generated during the screening procedure by the mating of both CuraGen Corporation proprietary yeast strains N106′ and YULH (U.S. Pat. Nos. 6,057,101 and 6,083,693).

[0506] 4. RACE: Techniques based on the polymerase chain reaction such as rapid amplification of cDNA ends (RACE), were used to isolate or complete the sequence of the cDNA of the invention. Usually multiple clones were sequenced from one or more human samples to derive the sequences for fragments. Various human tissue samples from different donors were used for the RACE reaction. The sequences derived from these procedures were included in the SeqCalling Assembly process described in preceding paragraphs.

[0507] 5. Exon Linking: The NOVX target sequences identified in the present invention were subjected to the exon linking process to confirm the sequence. PCR primers were designed by starting at the most upstream sequence available, for the forward primer, and at the most downstream sequence available for the reverse primer. In each case, the sequence was examined, walking inward from the respective termini toward the coding sequence, until a suitable sequence that is either unique or highly selective was encountered, or, in the case of the reverse primer, until the stop codon was reached. Such primers were designed based on in silico predictions for the full length cDNA, part (one or more exons) of the DNA or protein sequence of the target sequence, or by translated homology of the exons to closely related human sequences from other species. These primers were then employed in PCR amplification based on the following pool of human cDNAs: adrenal gland, bone marrow, brain-amygdala, brain-cerebellum, brain-hippocampus, brain-substantia nigra, brain-thalamus, brain-whole, fetal brain, fetal kidney, fetal liver, fetal lung, heart, kidney, lymphoma-Raji, mammary gland, pancreas, pituitary gland, placenta, prostate, salivary gland, skeletal muscle, small intestine, spinal cord, spleen, stomach, testis, thyroid, trachea, uterus. Usually the resulting amplicons were gel purified, cloned and sequenced to high redundancy. The PCR product derived from exon linking was cloned into the pCR2.1 vector from Invitrogen. The resulting bacterial clone has an insert covering the entire open reading frame cloned into the pCR2.1 vector. The resulting sequences from all clones were assembled with themselves, with other fragments in CuraGen Corporation's database and with public ESTs. Fragments and ESTs were included as components for an assembly when the extent of their identity with another component of the assembly was at least 95% over 50 bp. In addition, sequence traces were evaluated manually and edited for corrections if appropriate. These procedures provide the sequence reported herein.

[0508] 6. Physical Clone: Exons were predicted by homology and the intron/exon boundaries were determined using standard genetic rules. Exons were further selected and refined by means of similarity determination using multiple BLAST (for example, tBlastN, BlastX, and BlastN) searches, and, in some instances, GeneScan and Grail. Expressed sequences from both public and proprietary databases were also added when available to further define and complete the gene sequence. The DNA sequence was then manually corrected for apparent inconsistencies thereby obtaining the sequences encoding the full-length protein.

[0509] The PCR product derived by exon linking, covering the entire open reading frame, was cloned into the pCR2.1 vector from Invitrogen to provide clones used for expression and screening purposes.

### Example C

### Quantitative Expression Analysis of Clones in Various Cells and Tissues

[0510] The quantitative expression of various clones was assessed using microtiter plates containing RNA samples from a variety of normal and pathology-derived cells, cell lines and tissues using real time quantitative PCR (RTQ PCR). RTQ PCR was performed on an Applied Biosystems ABI PRISM® 7700 or an ABI PRISM® 7900 HT Sequence Detection System. Various collections of samples are assembled on the plates, and referred to as Panel 1 (containing normal tissues and cancer cell lines), Panel 2 (containing samples derived from tissues from normal and cancer sources), Panel 3 (containing cancer cell lines), Panel 4 (containing cells and cell lines from normal tissues and cells related to inflammatory conditions), Panel 5D/51 (containing human tissues and cell lines with an emphasis on metabolic diseases), AI^{—}comprehensive_panel (containing normal tissue and samples from autoinflammatory diseases), Panel CNSD.01 (containing samples from normal and diseased brains) and CNS_neurodegeneration_panel (containing samples from normal and Alzheimer's diseased brains).

[0511] RNA integrity from all samples is controlled for quality by visual assessment of agarose gel electropherograms using 28S and 18S ribosomal RNA staining intensity ratio as a guide (2:1 to 2.5:128s:18s) and the absence of low molecular weight RNAs that would be indicative of degradation products. Samples are controlled against genomic DNA contamination by RTQ PCR reactions run in the absence of reverse transcriptase using probe and primer sets designed to amplify across the span of a single exon.

[0512] First, the RNA samples were normalized to reference nucleic acids such as constitutively expressed genes (for example, β-actin and GAPDH). Normalized RNA (5 ul) was converted to cDNA and analyzed by RTQ-PCR using One Step RT-PCR Master Mix Reagents (Applied Biosystems; Catalog No. 4309169) and gene-specific primers according to the manufacturer's instructions.

[0513] In other cases, non-normalized RNA samples were converted to single strand cDNA (sscDNA) using Superscript II (Invitrogen Corporation; Catalog No. 18064-147) and random hexamers according to the manufacturer's instructions. Reactions containing up to 10 μg of total RNA were performed in a volume of 20 μl and incubated for 60 minutes at 42° C. This reaction can be scaled up to 50 μg of total RNA in a final volume of 100 μl. sscDNA samples are then normalized to reference nucleic acids as described previously, using 1× TaqMan® Universal Master mix (Applied Biosystems; catalog No. 4324020), following the manufacturer's instructions.

[0514] Probes and primers were designed for each assay according to Applied Biosystems Primer Express Software package (version I for Apple Computer's Macintosh Power PC) or a similar algorithm using the target sequence as input. Default settings were used for reaction conditions and the following parameters were set before selecting primers: primer concentration=250 nM, primer melting temperature (Tm) range=58°-60° C., primer optimal Tm=59° C., maximum primer difference=2° C., probe does not have 5′G, probe Tm must be 10° C. greater than primer Tm, amplicon size 75 bp to 100 bp. The probes and primers selected (see below) were synthesized by Synthegen (Houston, Tex., USA). Probes were double purified by HPLC to remove uncoupled dye and evaluated by mass spectroscopy to verify coupling of reporter and quencher dyes to the 5′ and 3′ ends of the probe, respectively. Their final concentrations were: forward and reverse primers, 900 nM each, and probe, 200 nM.

[0515] PCR conditions: When working with RNA samples, normalized RNA from each tissue and each cell line was spotted in each well of either a 96 well or a 384-well PCR plate (Applied Biosystems). PCR cocktails included either a single gene specific probe and primers set, or two multiplexed probe and primers sets (a set specific for the target clone and another gene-specific set multiplexed with the target probe). PCR reactions were set up using TaqMan® One-Step RT-PCR Master Mix (Applied Biosystems, Catalog No. 4313803) following manufacturer's instructions. Reverse transcription was performed at 48° C. for 30 minutes followed by amplification/PCR cycles as follows: 95° C. 10 min, then 40 cycles of 95° C. for 15 seconds, 60° C. for 1 minute. Results were recorded as CT values (cycle at which a given sample crosses a threshold level of fluorescence) using a log scale, with the difference in RNA concentration between a given sample and the sample with the lowest CT value being represented as 2 to the power of delta CT. The percent relative expression is then obtained by taking the reciprocal of this RNA difference and multiplying by 100.

[0516] When working with sscDNA samples, normalized sscDNA was used as described previously for RNA samples. PCR reactions containing one or two sets of probe and primers were set up as described previously, using 1× TaqMan® Universal Master mix (Applied Biosystems; catalog No. 4324020), following the manufacturer's instructions. PCR amplification was performed as follows: 95° C. 10 min, then 40 cycles of 95° C. for 15 seconds, 60° C. for 1 minute. Results were analyzed and processed as described previously.

[0517] Panels 1, 1.1, 1.2, and 1.3D

[0518] The plates for Panels 1, 1.1, 1.2 and 1.3D include 2 control wells (genomic DNA control and chemistry control) and 94 wells containing cDNA from various samples. The samples in these panels are broken into 2 classes: samples derived from cultured cell lines and samples derived from primary normal tissues. The cell lines are derived from cancers of the following types: lung cancer, breast cancer, melanoma, colon cancer, prostate cancer, CNS cancer, squamous cell carcinoma, ovarian cancer, liver cancer, renal cancer, gastric cancer and pancreatic cancer. Cell lines used in these panels are widely available through the American Type Culture Collection (ATCC), a repository for cultured cell lines, and were cultured using the conditions recommended by the ATCC. The normal tissues found on these panels are comprised of samples derived from all major organ systems from single adult individuals or fetuses. These samples are derived from the following organs: adult skeletal muscle, fetal skeletal muscle, adult heart, fetal heart, adult kidney, fetal kidney, adult liver, fetal liver, adult lung, fetal lung, various regions of the brain, the spleen, bone marrow, lymph node, pancreas, salivary gland, pituitary gland, adrenal gland, spinal cord, thymus, stomach, small intestine, colon, bladder, trachea, breast, ovary, uterus, placenta, prostate, testis and adipose.

[0519] In the results for Panels 1, 1.1, 1.2 and 1.3D, the following abbreviations are used:

[0520] ca.=carcinoma,

[0521] *=established from metastasis,

[0522] met=metastasis,

[0523] s cell var=small cell variant,

[0524] non-s=non-sm=non-small,

[0525] squam=squamous,

[0526] pl. eff=pl effusion=pleural effusion,

[0527] glio=glioma,

[0528] astro=astrocytoma, and

[0529] neuro=neuroblastoma.

[0530] General_screening_panel_v1.4, v1.5, v1.6 and 1.7

[0531] The plates for Panels 1.4, 1.5, 1.6 and 1.7 include 2 control wells (genomic DNA control and chemistry control) and 88 to 94 wells containing cDNA from various samples. The samples in Panels 1.4, 1.5, 1.6 and 1.7 are broken into 2 classes: samples derived from cultured cell lines and samples derived from primary normal tissues. The cell lines are derived from cancers of the following types: lung cancer, breast cancer, melanoma, colon cancer, prostate cancer, CNS cancer, squamous cell carcinoma, ovarian cancer, liver cancer, renal cancer, gastric cancer and pancreatic cancer. Cell lines used in Panels 1.4, 1.5, 1.6 and 1.7 are widely available through the American Type Culture Collection (ATCC), a repository for cultured cell lines, and were cultured using the conditions recommended by the ATCC. The normal tissues found on Panels 1.4, 1.5, 1.6 and 1.7 are comprised of pools of samples derived from all major organ systems from 2 to 5 different adult individuals or fetuses. These samples are derived from the following organs: adult skeletal muscle, fetal skeletal muscle, adult heart, fetal heart, adult kidney, fetal kidney, adult liver, fetal liver, adult lung, fetal lung, various regions of the brain, the spleen, bone marrow, lymph node, pancreas, salivary gland, pituitary gland, adrenal gland, spinal cord, thymus, stomach, small intestine, colon, bladder, trachea, breast, ovary, uterus, placenta, prostate, testis and adipose. Abbreviations are as described for Panels 1, 1.1, 1.2, and 1.3D.

[0532] Panels 2D, 2.2, 2.3 and 2.4

[0533] The plates for Panels 2D, 2.2, 2.3 and 2.4 generally include 2 control wells and 94 test samples composed of RNA or cDNA isolated from human tissue procured by surgeons working in close cooperation with the National Cancer Institute's Cooperative Human Tissue Network (CHTN) or the National Disease Research Initiative (NDRI) or from Ardais or Clinomics). The tissues are derived from human malignancies and in cases where indicated many malignant tissues have “matched margins” obtained from noncancerous tissue just adjacent to the tumor. These are termed normal adjacent tissues and are denoted “NAT” in the results below. The tumor tissue and the “matched margins” are evaluated by two independent pathologists (the surgical pathologists and again by a pathologist at NDRI/CHTN/Ardais/Clinomics). Unmatched RNA samples from tissues without malignancy (normal tissues) were also obtained from Ardais or Clinomics. This analysis provides a gross histopathological assessment of tumor differentiation grade. Moreover, most samples include the original surgical pathology report that provides information regarding the clinical stage of the patient. These matched margins are taken from the tissue surrounding (i.e. immediately proximal) to the zone of surgery (designated “NAT”, for normal adjacent tissue, in Table RR). In addition, RNA and cDNA samples were obtained from various human tissues derived from autopsies performed on elderly people or sudden death victims (accidents, etc.). These tissues were ascertained to be free of disease and were purchased from various commercial sources such as Clontech (Palo Alto, Calif.), Research Genetics, and Invitrogen.

[0534] HASS Panel v 1.0

[0535] The HASS panel v 1.0 plates are comprised of 93 cDNA samples and two controls. Specifically, 81 of these samples are derived from cultured human cancer cell lines that had been subjected to serum starvation, acidosis and anoxia for different time periods as well as controls for these treatments, 3 samples of human primary cells, 9 samples of malignant brain cancer (4 medulloblastomas and 5 glioblastomas) and 2 controls. The human cancer cell lines are obtained from ATCC (American Type Culture Collection) and fall into the following tissue groups: breast cancer, prostate cancer, bladder carcinomas, pancreatic cancers and CNS cancer cell lines. These cancer cells are all cultured under standard recommended conditions. The treatments used (serum starvation, acidosis and anoxia) have been previously published in the scientific literature. The primary human cells were obtained from Clonetics (Walkersville, Md.) and were grown in the media and conditions recommended by Clonetics. The malignant brain cancer samples are obtained as part of a collaboration (Henry Ford Cancer Center) and are evaluated by a pathologist prior to CuraGen receiving the samples . RNA was prepared from these samples using the standard procedures. The genomic and chemistry control wells have been described previously.

[0536] ARDAIS Panel v 1.0

[0537] The plates for ARDAIS panel v 1.0 generally include 2 control wells and 22 test samples composed of RNA isolated from human tissue procured by surgeons working in close cooperation with Ardais Corporation. The tissues are derived from human lung malignancies (lung adenocarcinoma or lung squamous cell carcinoma) and in cases where indicated many malignant samples have “matched margins” obtained from noncancerous lung tissue just adjacent to the tumor. These matched margins are taken from the tissue surrounding (i.e. immediately proximal) to the zone of surgery (designated “NAT”, for normal adjacent tissue) in the results below. The tumor tissue and the “matched margins” are evaluated by independent pathologists (the surgical pathologists and again by a pathologist at Ardais). Unmatched malignant and non-malignant RNA samples from lungs were also obtained from Ardais. Additional information from Ardais provides a gross histopathological assessment of tumor differentiation grade and stage. Moreover, most samples include the original surgical pathology report that provides information regarding the clinical state of the patient.

[0538] Panel 3D, 3.1 and 3.2

[0539] The plates of Panel 3D, 3.1, and 3.2 are comprised of 94 cDNA samples and two control samples. Specifically, 92 of these samples are derived from cultured human cancer cell lines, 2 samples of human primary cerebellar tissue and 2 controls. The human cell lines are generally obtained from ATCC (American Type Culture Collection), NCI or the German tumor cell bank and fall into the following tissue groups: Squamous cell carcinoma of the tongue, breast cancer, prostate cancer, melanoma, epidermoid carcinoma, sarcomas, bladder carcinomas, pancreatic cancers, kidney cancers, leukemias/lymphomas, ovarian/uterine/cervical, gastric, colon, lung and CNS cancer cell lines. In addition, there are two independent samples of cerebellum. These cells are all cultured under standard recommended conditions and RNA extracted using the standard procedures. The cell lines in panel 3D, 3.1, 3.2, 1, 1.1., 1.2, 1.3D, 1.4, 1.5, and 1.6 are of the most common cell lines used in the scientific literature.

[0540] Panels 4D, 4R, and 4.1D

[0541] Panel 4 includes samples on a 96 well plate (2 control wells, 94 test samples) composed of RNA (Panel 4R) or cDNA (Panels 4D/4.1D) isolated from various human cell lines or tissues related to inflammatory conditions. Total RNA from control normal tissues such as colon and lung (Stratagene, La Jolla, Calif.) and thymus and kidney (Clontech) was employed. Total RNA from liver tissue from cirrhosis patients and kidney from lupus patients was obtained from BioChain (Biochain Institute, Inc., Hayward, Calif.). Intestinal tissue for RNA preparation from patients diagnosed as having Crohn's disease and ulcerative colitis was obtained from the National Disease Research Interchange (NDRI) (Philadelphia, Pa.).

[0542] Astrocytes, lung fibroblasts, dermal fibroblasts, coronary artery smooth muscle cells, small airway epithelium, bronchial epithelium, microvascular dermal endothelial cells, microvascular lung endothelial cells, human pulmonary aortic endothelial cells, human umbilical vein endothelial cells were all purchased from Clonetics (Walkersville, Md.) and grown in the media supplied for these cell types by Clonetics. These primary cell types were activated with various cytokines or combinations of cytokines for 6 and/or 12-14 hours, as indicated. The following cytokines were used; IL-1 beta at approximately 1-5 ng/ml, TNF alpha at approximately 5-10 ng/ml, IFN gamma at approximately 20-50 ng/ml, IL-4 at approximately 5-10 ng/ml, IL-9 at approximately 5-10 ng/ml, IL-13 at approximately 5-10 ng/ml. Endothelial cells were sometimes starved for various times by culture in the basal media from Clonetics with 0.1% serum.

[0543] Mononuclear cells were prepared from blood of employees at CuraGen Corporation, using Ficoll. LAK cells were prepared from these cells by culture in DMEM 5% FCS (Hyclone), 100 μM non essential amino acids (Gibco/Life Technologies, Rockville, Md.), 1 mM sodium pyruvate (Gibco), mercaptoethanol 5.5×10⁻⁵M (Gibco), and 10 mM Hepes (Gibco) and Interleukin 2 for 4-6 days. Cells were then either activated with 10-20 ng/ml PMA and 1-2 μg/ml ionomycin, IL-12 at 5-10 ng/ml, IFN gamma at 20-50 ng/ml and IL-18 at 5-10 ng/ml for 6 hours. In some cases, mononuclear cells were cultured for 4-5 days in DMEM 5% FCS (Hyclone), 100 μM non essential amino acids (Gibco), 1 mM sodium pyruvate (Gibco), mercaptoethanol 5.5×10⁻⁵M (Gibco), and 10 mM Hepes (Gibco) with PHA (phytohemagglutinin) or PWM (pokeweed mitogen) at approximately 5 μg/ml. Samples were taken at 24, 48 and 72 hours for RNA preparation. MLR (mixed lymphocyte reaction) samples were obtained by taking blood from two donors, isolating the mononuclear cells using Ficoll and mixing the isolated mononuclear cells 1:1 at a final concentration of approximately 2×10⁶cells/ml in DMEM 5% FCS (Hyclone), 100 μM non essential amino acids (Gibco), 1 mM sodium pyruvate (Gibco), mercaptoethanol (5.5×10⁻⁵M) (Gibco), and 10 mM Hepes (Gibco). The MLR was cultured and samples taken at various time points ranging from 1-7 days for RNA preparation.

[0544] Monocytes were isolated from mononuclear cells using CD14 Miltenyi Beads, +ve VS selection columns and a Vario Magnet according to the manufacturer's instructions. Monocytes were differentiated into dendritic cells by culture in DMEM 5% fetal calf serum (FCS) (Hyclone, Logan, Utah), 100 μM non essential amino acids (Gibco), 1 mM sodium pyruvate (Gibco), mercaptoethanol 5.5×10⁻⁵M (Gibco), and 10 mM Hepes (Gibco), 50 ng/ml GMCSF and 5 ng/ml IL-4 for 5-7 days. Macrophages were prepared by culture of monocytes for 5-7 days in DMEM 5% FCS (Hyclone), 1001, M non essential amino acids (Gibco), 1 mM sodium pyruvate (Gibco), mercaptoethanol 5.5×10⁻⁵M (Gibco), 10 mM Hepes (Gibco) and 10% AB Human Serum or MCSF at approximately 50 ng/ml. Monocytes, macrophages and dendritic cells were stimulated for 6 and 12-14 hours with lipopolysaccharide (LPS) at 10 ng/ml. Dendritic cells were also stimulated with anti-CD40 monoclonal antibody (Pharmingen) at 10 μg/ml for 6 and 12-14 hours.

[0545] CD4 lymphocytes, CD8 lymphocytes and NK cells were also isolated from mononuclear cells using CD4, CD8 and CD56 Miltenyi beads, positive VS selection columns and a Vario Magnet according to the manufacturer's instructions. CD45RA and CD45RO CD4 lymphocytes were isolated by depleting mononuclear cells of CD8, CD56, CD14 and CD19 cells using CD8, CD56, CD14 and CD19 Miltenyi beads and positive selection. CD45RO beads were then used to isolate the CD45RO CD4 lymphocytes with the remaining cells being CD45RA CD4 lymphocytes. CD45RA CD4, CD45RO CD4 and CD8 lymphocytes were placed in DMEM 5% FCS (Hyclone), 100 μM non essential amino acids (Gibco), 1 mM sodium pyruvate (Gibco), mercaptoethanol 5.5×10⁻⁵M (Gibco), and 10 mM Hepes (Gibco) and plated at 10⁶cells/ml onto Falcon 6 well tissue culture plates that had been coated overnight with 0.51 g/ml anti-CD28 (Pharmingen) and 3ug/ml anti-CD3 (OKT3, ATCC) in PBS. After 6 and 24 hours, the cells were harvested for RNA preparation. To prepare chronically activated CD8 lymphocytes, we activated the isolated CD8 lymphocytes for 4 days on anti-CD28 and anti-CD3 coated plates and then harvested the cells and expanded them in DMEM 5% FCS (Hyclone), 110 μM non essential amino acids (Gibco), 1 mM sodium pyruvate (Gibco), mercaptoethanol 5.5×10⁻⁵M (Gibco), and 10 mM Hepes (Gibco) and IL-2. The expanded CD8 cells were then activated again with plate bound anti-CD3 and anti-CD28 for 4 days and expanded as before. RNA was isolated 6 and 24 hours after the second activation and after 4 days of the second expansion culture. The isolated NK cells were cultured in DMEM 5% FCS (Hyclone), 100 μM non essential amino acids (Gibco), 1 mM sodium pyruvate (Gibco), mercaptoethanol 5.5×10⁻⁵M (Gibco), and 10 mM Hepes (Gibco) and IL-2 for 4-6 days before RNA was prepared.

[0546] To obtain B cells, tonsils were procured from NDRI. The tonsil was cut up with sterile dissecting scissors and then passed through a sieve. Tonsil cells were then spun down and resupended at 10⁶cells/ml in DMEM 5% FCS (Hyclone), I OOIM non essential amino acids (Gibco), IrrM sodium pyruvate (Gibco), mercaptoethanol 5.5xlO-5M (Gibco), and 10 mM Hepes (Gibco). To activate the cells, we used PWM at 5 μg/ml or anti-CD40 (Pharmingen) at approximately 1 Ogg/ml and IL-4 at 5-10 ng/ml. Cells were harvested for RNA preparation at 24,48 and 72 hours.

[0547] To prepare the primary and secondary Th1/Th2 and Trl cells, six-well Falcon plates were coated overnight with 10 μg/ml anti-CD28 (Pharmingen) and 2 μg/ml OKT3 (ATCC), and then washed twice with PBS. Umbilical cord blood CD4 lymphocytes (Poietic Systems, German Town, Md.) were cultured at 10⁵-10⁶cells/ml in DMEM 5% FCS (Hyclone), 100 μM non essential amino acids (Gibco), 1 mM sodium pyruvate (Gibco), mercaptoethanol 5.5×10⁻⁵M (Gibco), 10 mM Hepes (Gibco) and IL-2 (4 ng/ml). IL-12 (5 ng/ml) and anti-IL4 (1 μg/ml) were used to direct to Th1, while IL-4 (5 ng/ml) and anti-IFN gamma (1 μg/ml) were used to direct to Th2 and IL-10 at 5 ng/ml was used to direct to Tr1. After 4-5 days, the activated Th1, Th2 and Tr1 lymphocytes were washed once in DMEM and expanded for 4-7 days in DMEM 5% FCS (Hyclone), 100 μM non essential amino acids (Gibco), 1 mM sodium pyruvate (Gibco), mercaptoethanol 5.5×10⁻⁵M (Gibco), 10 mM Hepes (Gibco) and IL-2 (1 ng/ml). Following this, the activated Th1, Th2 and Tr1 lymphocytes were re-stimulated for 5 days with anti-CD28/OKT3 and cytokines as described above, but with the addition of anti-CD95L (1 μg/ml) to prevent apoptosis. After 4-5 days, the Th1, Th2 and Tr1 lymphocytes were washed and then expanded again with IL-2 for 4-7 days. Activated Th1 and Th2 lymphocytes were maintained in this way for a maximum of three cycles. RNA was prepared from primary and secondary Th1, Th2 and Tr1 after 6 and 24 hours following the second and third activations with plate bound anti-CD3 and anti-CD28 mAbs and 4 days into the second and third expansion cultures in Interleukin 2.

[0548] The following leukocyte cells lines were obtained from the ATCC: Ramos, EOL-1, KU-812. EOL cells were further differentiated by culture in 0.1 mM dbcAMP at 5×10⁵cells/ml for 8 days, changing the media every 3 days and adjusting the cell concentration to 5×10⁵cells/ml. For the culture of these cells, we used DMEM or RPMI (as recommended by the ATCC), with the addition of 5% FCS (Hyclone), 100CM non essential amino acids (Gibco), 1 mM sodium pyruvate (Gibco), mercaptoethanol 5.5×10⁻⁵M (Gibco), 10 mM Hepes (Gibco). RNA was either prepared from resting cells or cells activated with PMA at 10 ng/ml and ionomycin at 1 μg/ml for 6 and 14 hours. Keratinocyte line CCD106 and an airway epithelial tumor line NCI-H292 were also obtained from the ATCC. Both were cultured in DMEM 5% FCS (Hyclone), 100 μM non essential amino acids (Gibco), 1 mM sodium pyruvate (Gibco), mercaptoethanol 5.5×10⁻⁵M (Gibco), and 10 mM Hepes (Gibco). CCD1106 cells were activated for 6 and 14 hours with approximately 5 ng/ml TNF alpha and 1 ng/ml IL-1 beta, while NCI-H292 cells were activated for 6 and 14 hours with the following cytokines: 5 ng/ml IL-4, 5 ng/ml IL-9, 5 ng/ml IL-13 and 25 ng/ml IFN gamma.

[0549] For these cell lines and blood cells, RNA was prepared by lysing approximately 10⁷cells/ml using Trizol (Gibco BRL). Briefly, 1/10 volume of bromochloropropane (Molecular Research Corporation) was added to the RNA sample, vortexed and after 10 minutes at room temperature, the tubes were spun at 14,000 rpm in a Sorvall SS34 rotor. The aqueous phase was removed and placed in a 15 ml Falcon Tube. An equal volume of isopropanol was added and left at −20° C. overnight. The precipitated RNA was spun down at 9,000 rpm for 15 min in a Sorvall SS34 rotor and washed in 70% ethanol. The pellet was redissolved in 300 μl of RNAse-free water and 35 μl buffer (Promega) 5 μl DTT, 7 μl RNAsin and 8 μl DNAse were added. The tube was incubated at 37° C. for 30 minutes to remove contaminating genomic DNA, extracted once with phenol chloroform and re-precipitated with 1/10 volume of 3M sodium acetate and 2 volumes of 100% ethanol. The RNA was spun down and placed in RNAse free water. RNA was stored at −80° C.

[0550] AI_comprehensive Panel_v1.0

[0551] The plates for AI_comprehensive panel_v1.0 include two control wells and 89 test samples comprised of cDNA isolated from surgical and postmortem human tissues obtained from the Backus Hospital and Clinomics (Frederick, Md.). Total RNA was extracted from tissue samples from the Backus Hospital in the Facility at CuraGen. Total RNA from other tissues was obtained from Clinomics.

[0552] Joint tissues including synovial fluid, synovium, bone and cartilage were obtained from patients undergoing total knee or hip replacement surgery at the Backus Hospital. Tissue samples were immediately snap frozen in liquid nitrogen to ensure that isolated RNA was of optimal quality and not degraded. Additional samples of osteoarthritis and rheumatoid arthritis joint tissues were obtained from Clinomics. Normal control tissues were supplied by Clinomics and were obtained during autopsy of trauma victims.

[0553] Surgical specimens of psoriatic tissues and adjacent matched tissues were provided as total RNA by Clinomics. Two male and two female patients were selected between the ages of 25 and 47. None of the patients were taking prescription drugs at the time samples were isolated.

[0554] Surgical specimens of diseased colon from patients with ulcerative colitis and Crohns disease and adjacent matched tissues were obtained from Clinomics. Bowel tissue from three female and three male Crohn's patients between the ages of 41-69 were used. Two patients were not on prescription medication while the others were taking dexamethasone, phenobarbital, or tylenol. Ulcerative colitis tissue was from three male and four female patients. Four of the patients were taking lebvid and two were on phenobarbital.

[0555] Total RNA from post mortem lung tissue from trauma victims with no disease or with emphysema, asthma or COPD was purchased from Clinomics. Emphysema patients ranged in age from 40-70 and all were smokers, this age range was chosen to focus on patients with cigarette-linked emphysema and to avoid those patients with alpha-1 anti-trypsin deficiencies. Asthma patients ranged in age from 36-75, and excluded smokers to prevent those patients that could also have COPD. COPD patients ranged in age from 35-80 and included both smokers and non-smokers. Most patients were taking corticosteroids, and bronchodilators.

[0556] In the labels employed to identify tissues in the AI_comprehensive panel_v1.0 panel, the following abbreviations are used:

[0557] AI=Autoimmunity

[0558] Syn=Synovial

[0559] Normal=No apparent disease

[0560] Rep22/Rep20=individual patients

[0561] RA=Rheumatoid arthritis

[0562] Backus=From Backus Hospital

[0563] OA=Osteoarthritis

[0564] (SS) (BA) (MF)=Individual patients

[0565] Adj=Adjacent tissue

[0566] Match control=adjacent tissues

[0567] -M=Male

[0568] -F=Female

[0569] COPD=Chronic obstructive pulmonary disease

[0570] AI.05 Chondrosarcoma

[0571] The AI.05 chondrosarcoma plates are comprised of SW1353 cells that had been subjected to serum starvation and treatment with cytokines that are known to induce MMP (1, 3 and 13) synthesis (eg. IL1beta). These treatments include: IL-1beta (10 ng/ml), IL-1beta+TNF-alpha (50 ng/ml), IL-1beta+Oncostatin (50 ng/ml) and PMA (100 ng/ml). The SW1353 cells were obtained from the ATCC (American Type Culture Collection) and were all cultured under standard recommended conditions. The SW1353 cells were plated at 3×10⁵ cells/ml (in DMEM medium-10% FBS) in 6-well plates. The treatment was done in triplicate, for 6 and 18 h. The supernatants were collected for analysis of MMP 1, 3 and 13 production and for RNA extraction. RNA was prepared from these samples using the standard procedures.

[0572] Panels 5D and 5I

[0573] The plates for Panel 5D and 5I include two control wells and a variety of cDNAs isolated from human tissues and cell lines with an emphasis on metabolic diseases. Metabolic tissues were obtained from patients enrolled in the Gestational Diabetes study. Cells were obtained during different stages in the differentiation of adipocytes from human mesenchymal stem cells. Human pancreatic islets were also obtained.

[0574] In the Gestational Diabetes study subjects are young (18-40 years), otherwise healthy women with and without gestational diabetes undergoing routine (elective) Caesarean section. After delivery of the infant, when the surgical incisions were being repaired/closed, the obstetrician removed a small sample (<1 cc) of the exposed metabolic tissues during the closure of each surgical level. The biopsy material was rinsed in sterile saline, blotted and fast frozen within 5 minutes from the time of removal. The tissue was then flash frozen in liquid nitrogen and stored, individually, in sterile screw-top tubes and kept on dry ice for shipment to or to be picked up by CuraGen. The metabolic tissues of interest include uterine wall (smooth muscle), visceral adipose, skeletal muscle (rectus) and subcutaneous adipose. Patient descriptions are as follows:

[0575] Patient 2: Diabetic Hispanic, overweight, not on insulin

[0576] Patient 7-9: Nondiabetic Caucasian and obese (BMI>30)

[0577] Patient 10: Diabetic Hispanic, overweight, on insulin

[0578] Patient 11: Nondiabetic African American and overweight

[0579] Patient 12: Diabetic Hispanic on insulin

[0580] Adiocyte differentiation was induced in donor progenitor cells obtained from Osirus (a division of Clonetics/Bio Whittaker) in triplicate, except for Donor 3U which had only two replicates. Scientists at Clonetics isolated, grew and differentiated human mesenchymal stem cells (HuMSCs) for CuraGen based on the published protocol found in Mark F. Pittenger, et al., Multilineage Potential of Adult Human Mesenchymal Stem Cells Science Apr. 2, 1999: 143-147. Clonetics provided Trizol lysates or frozen pellets suitable for mRNA isolation and ds cDNA production. A general description of each donor is as follows:

[0581] Donor 2 and 3 U: Mesenchymal Stem cells, Undifferentiated Adipose

[0582] Donor 2 and 3 AM: Adipose, AdiposeMidway Differentiated

[0583] Donor 2 and 3 AD: Adipose, Adipose Differentiated

[0584] Human cell lines were generally obtained from ATCC (American Type Culture Collection), NCI or the German tumor cell bank and fall into the following tissue groups: kidney proximal convoluted tubule, uterine smooth muscle cells, small intestine, liver HepG2 cancer cells, heart primary stromal cells, and adrenal cortical adenoma cells. These cells are all cultured under standard recommended conditions and RNA extracted using the standard procedures. All samples were processed at CuraGen to produce single stranded cDNA.

[0585] Panel 5I contains all samples previously described with the addition of pancreatic islets from a 58 year old female patient obtained from the Diabetes Research Institute at the University of Miami School of Medicine. Islet tissue was processed to total RNA at an outside source and delivered to CuraGen for addition to panel 5I.

[0586] In the labels employed to identify tissues in the 5D and 5I panels, the following abbreviations are used:

[0587] GO Adipose=Greater Omentum Adipose

[0588] SK=Skeletal Muscle

[0589] UT=Uterus

[0590] PL=Placenta

[0591] AD=Adipose Differentiated

[0592] AM=Adipose Midway Differentiated

[0593] U=Undifferentiated Stem Cells

[0594] Panel CNSD.01

[0595] The plates for Panel CNSD.01 include two control wells and 94 test samples comprised of cDNA isolated from postmortem human brain tissue obtained from the Harvard Brain Tissue Resource Center. Brains are removed from calvaria of donors between 4 and 24 hours after death, sectioned by neuroanatomists, and frozen at −80° C. in liquid nitrogen vapor. All brains are sectioned and examined by neuropathologists to confirm diagnoses with clear associated neuropathology.

[0596] Disease diagnoses are taken from patient records. The panel contains two brains from each of the following diagnoses: Alzheimer's disease, Parkinson's disease, Huntington's disease, Progressive Supemuclear Palsy, Depression, and “Normal controls”. Within each of these brains, the following regions are represented: cingulate gyrus, temporal pole, globus palladus, substantia nigra, Brodman Area 4 (primary motor strip), Brodman Area 7 (parietal cortex), Brodman Area 9 (prefrontal cortex), and Brodman area 17 (occipital cortex). Not all brain regions are represented in all cases; e.g., Huntington's disease is characterized in part by neurodegeneration in the globus palladus, thus this region is impossible to obtain from confirmed Huntington's cases. Likewise Parkinson's disease is characterized by degeneration of the substantia nigra making this region more difficult to obtain. Normal control brains were examined for neuropathology and found to be free of any pathology consistent with neurodegeneration.

[0597] In the labels employed to identify tissues in the CNS panel, the following abbreviations are used:

[0598] PSP=Progressive supranuclear palsy

[0599] Sub Nigra=Substantia nigra

[0600] Glob Palladus=Globus palladus

[0601] Temp Pole=Temporal pole

[0602] Cing Gyr=Cingulate gyrus

[0603] BA 4=Brodman Area 4

[0604] Panel CNS_Neurodegeneration_V1.0

[0605] The plates for Panel CNS_Neurodegeneration_V1.0 include two control wells and 47 test samples comprised of cDNA isolated from postmortem human brain tissue obtained from the Harvard Brain Tissue Resource Center (McLean Hospital) and the Human Brain and Spinal Fluid Resource Center (VA Greater Los Angeles Healthcare System). Brains are removed from calvaria of donors between 4 and 24 hours after death, sectioned by neuroanatomists, and frozen at −80° C. in liquid nitrogen vapor. All brains are sectioned and examined by neuropathologists to confirm diagnoses with clear associated neuropathology.

[0606] Disease diagnoses are taken from patient records. The panel contains six brains from Alzheimer's disease (AD) patients, and eight brains from “Normal controls” who showed no evidence of dementia prior to death. The eight normal control brains are divided into two categories: Controls with no dementia and no Alzheimer's like pathology (Controls) and controls with no dementia but evidence of severe Alzheimer's like pathology, (specifically senile plaque load rated as level 3 on a scale of 0-3; 0=no evidence of plaques, 3=severe AD senile plaque load). Within each of these brains, the following regions are represented: hippocampus, temporal cortex (Brodman Area 21), parietal cortex (Brodman area 7), and occipital cortex (Brodman area 17). These regions were chosen to encompass all levels of neurodegeneration in AD. The hippocampus is a region of early and severe neuronal loss in AD; the temporal cortex is known to show neurodegeneration in AD after the hippocampus; the parietal cortex shows moderate neuronal death in the late stages of the disease; the occipital cortex is spared in AD and therefore acts as a “control” region within AD patients. Not all brain regions are represented in all cases.

[0607] In the labels employed to identify tissues in the CNS_Neurodegeneration_V1.0 panel, the following abbreviations are used:

[0608] AD=Alzheimer's disease brain; patient was demented and showed AD-like pathology upon autopsy

[0609] Control=Control brains; patient not demented, showing no neuropathology

[0610] Control (Path)=Control brains; pateint not demented but showing sever AD-like pathology

[0611] SupTemporal Ctx=Superior Temporal Cortex

[0612] Inf Temporal Ctx=Inferior Temporal Cortex

[0613] A. CG125312-01 (NOV6a): Similar to Myosin IF (Myosin IE).

[0614] Expression of gene CG125312-01 was assessed using the primer-probe set Ag7882, described in Table AA. Results of the RTQ-PCR runs are shown in Tables AB, AC and AD.

TABLE AA
Probe Name Ag7882

| | | | Start | SEQ ID |
|---|---|---|---|---|
| Primers | Sequences | Length | Positions | No |
| Forward | 5′-cagaccaqtgagcagttcct-3′ | 20 | 1721 | 133 |
| Probe | TET-5′-ccccttcttgtctccatccagctt-3′-TAMRA | 24 | 1760 | 134 |
| Reverse | 5′-cttgtttcttgatcttqgagcc-3′ | 22 | 1799 | 135 |

[0615] TABLE AB
CNS_neurodegeneration_v1.0

| | Rel. Exp. (%) |
|---|---|
| | Ag7882, Run |
| Tissue Name | 316264628 |
| AD 1 Hippo | 7.0 |
| AD 2 Hippo | 6.9 |
| AD 3 Hippo | 8.0 |
| AD 4 Hippo | 0.0 |
| AD 5 Hippo | 5.1 |
| AD 6 Hippo | 10.3 |
| Control 2 Hippo | 0.0 |
| Control 4 Hippo | 17.7 |
| Control (Path) 3 Hippo | 0.0 |
| AD 1 Temporal Ctx | 2.4 |
| AD 2 Temporal Ctx | 6.7 |
| AD 3 Temporal Ctx | 0.0 |
| AD 4 Temporal Ctx | 0.0 |
| AD 5 Inf Temporal Ctx | 6.6 |
| AD 5 Sup Temporal Ctx | 6.5 |
| AD 6 Inf Temporal Ctx | 100.0 |
| AD 6 Sup Temporal Ctx | 62.0 |
| Control 1 Temporal Ctx | 0.0 |
| Control 2 Temporal Ctx | 38.4 |
| Control 3 Temporal Ctx | 0.0 |
| Control 3 Temporal Ctx | 1.8 |
| Control (Path) 1 Temporal Ctx | 0.0 |
| Control (Path) 2 Temporal Ctx | 0.0 |
| Control (Path) 3 Temporal Ctx | 0.0 |
| Control (Path) 4 Temporal Ctx | 7.5 |
| AD 1 Occipital Ctx | 0.0 |
| AD 2 Occipital Ctx (Missing) | 0.0 |
| AD 3 Occipital Ctx | 2.3 |
| AD 4 Occipital Ctx | 0.0 |
| AD 5 Occipital Ctx | 9.0 |
| AD 6 Occipital Ctx | 2.0 |
| Control 1 Occipital Ctx | 15.0 |
| Control 2 Occipital Ctx | 13.9 |
| Control 3 Occipital Ctx | 11.9 |
| Control 4 Occipital Ctx | 0.0 |
| Control (Path) 1 Occipital Ctx | 18.2 |
| Control (Path) 2 Occipital Ctx | 0.0 |
| Control (Path) 3 Occipital Ctx | 2.3 |
| Control (Path) 4 Occipital Ctx | 0.0 |
| Control 1 Parietal Ctx | 38.2 |
| Control 2 Parietal Ctx | 15.5 |
| Control 3 Parietal Ctx | 0.0 |
| Control (Path) 1 Parietal Ctx | 16.5 |
| Control (Path) 2 Parietal Ctx | 1.1 |
| Control (Path) 3 Parietal Ctx | 0.0 |
| Control (Path) 4 Parietal Ctx | 11.7 |

[0616] TABLE AC
General_screening_panel_v1.7

| | Rel. Exp. (%) |
|---|---|
| | Ag7882, Run |
| Tissue Name | 319066291 |
| Adipose | 0.1 |
| HUVEC | 0.0 |
| Melanoma* Hs688(A).T | 0.0 |
| Melanoma* Hs688(B).T | 0.0 |
| Melanoma (met) SK-MEL-5 | 100.0 |
| Testis | 0.0 |
| Prostate ca. (bone met) PC-3 | 0.0 |
| Prostate ca. DU145 | 0.0 |
| Prostate pool | 0.0 |
| Uterus pool | 0.0 |
| Ovarian ca. OVCAR-3 | 0.0 |
| Ovarian ca. (ascites) SK-OV-3 | 0.0 |
| Ovarian ca. OVCAR-4 | 0.0 |
| Ovarian ca. OVCAR-5 | 0.0 |
| Ovarian ca. IGROV-1 | 0.0 |
| Ovarian ca. OVCAR-8 | 0.0 |
| Ovary | 0.0 |
| Breast ca. MCF-7 | 0.0 |
| Breast ca. MDA-MB-231 | 0.0 |
| Breast ca. BT-549 | 0.0 |
| Breast ca. T47D | 0.0 |
| Breast pool | 0.0 |
| Trachea | 0.0 |
| Lung | 0.3 |
| Fetal Lung | 0.2 |
| Lung ca. NCI-N417 | 0.0 |
| Lung ca. LX-1 | 0.0 |
| Lung ca. NCI-H146 | 0.0 |
| Lung ca. SHP-77 | 0.0 |
| Lung ca. NCI-H23 | 0.0 |
| Lung ca. NCI-H460 | 0.0 |
| Lung ca. HOP-62 | 0.0 |
| Lung ca. NCI-H522 | 0.0 |
| Lung ca. DMS-114 | 0.0 |
| Liver | 0.0 |
| Fetal Liver | 0.1 |
| Kidney pool | 0.1 |
| Fetal Kidney | 0.0 |
| Renal ca. 786-0 | 0.0 |
| Renal ca. A498 | 0.0 |
| Renal ca. ACHN | 0.0 |
| Renal ca. UO-31 | 0.0 |
| Renal ca. TK-10 | 0.0 |
| Bladder | 0.1 |
| Gastric ca. (liver met.) NCI-N87 | 0.0 |
| Stomach | 0.0 |
| Colon ca. SW-948 | 0.0 |
| Colon ca. SW480 | 0.0 |
| Colon ca. (SW480 met) SW620 | 0.0 |
| Colon ca. HT29 | 0.0 |
| Colon ca. HCT-116 | 0.0 |
| Colon cancer tissue | 0.0 |
| Colon ca. SW1116 | 0.0 |
| Colon ca. Colo-205 | 0.0 |
| Colon ca. SW-48 | 0.0 |
| Colon | 0.1 |
| Small Intestine | 0.0 |
| Fetal Heart | 0.0 |
| Heart | 0.0 |
| Lymph Node pool 1 | 0.0 |
| Lymph Node pool 2 | 0.4 |
| Fetal Skeletal Muscle | 0.0 |
| Skeletal Muscle pool | 0.0 |
| Skeletal Muscle | 0.0 |
| Spleen | 0.2 |
| Thymus | 0.0 |
| CNS cancer (glio/astro) SF-268 | 0.0 |
| CNS cancer (glio/astro) T98G | 0.0 |
| CNS cancer (neuro; met) SK-N-AS | 0.0 |
| CNS cancer (astro) SF-539 | 0.0 |
| CNS cancer (astro) SNB-75 | 0.0 |
| CNS cancer (glio) SNB-19 | 0.0 |
| CNS cancer (glio) SF-295 | 0.0 |
| Brain (Amygdala) | 0.0 |
| Brain (Cerebellum) | 0.0 |
| Brain (Fetal) | 0.0 |
| Brain (Hippocampus) | 0.0 |
| Cerebral Cortex pool | 0.0 |
| Brain (Substantia nigra) | 0.0 |
| Brain (Thalamus) | 0.0 |
| Brain (Whole) | 0.1 |
| Spinal Cord | 0.0 |
| Adrenal Gland | 0.0 |
| Pituitary Gland | 0.0 |
| Salivary Gland | 0.0 |
| Thyroid | 0.1 |
| Pancreatic ca. PANC-1 | 0.0 |
| Pancreas pool | 0.0 |

[0617] TABLE AD
Panel 4.1D

| | Rel. Exp. (%) |
|---|---|
| | Ag7882, Run |
| Tissue Name | 316264536 |
| Secondary Th1 act | 6.9 |
| Secondary Th2 act | 4.7 |
| Secondary Tr1 act | 1.0 |
| Secondary Th1 rest | 3.8 |
| Secondary Th2 rest | 2.6 |
| Secondary Tr1 rest | 6.3 |
| Primary Th1 act | 0.0 |
| Primary Th2 act | 2.3 |
| Primary Tr1 act | 0.5 |
| Primary Th1 rest | 0.8 |
| Primary Th2 rest | 2.7 |
| Primary Tr1 rest | 0.3 |
| CD45RA CD4 lymphocyte act | 0.0 |
| CD45RO CD4 lymphocyte act | 4.4 |
| CD8 lymphocyte act | 2.5 |
| Secondary CD8 lymphocyte rest | 0.0 |
| Secondary CD8 lymphocyte act | 3.0 |
| CD4 lymphocyte none | 3.6 |
| 2ry Th1/Th2/Tr1_anti-CD95 CH11 | 9.9 |
| LAK cells rest | 11.0 |
| LAK cells IL-2 | 5.9 |
| LAK cells IL-2 + IL-12 | 0.0 |
| LAK cells IL-2 + IFN gamma | 1.7 |
| LAK cells IL-2 + IL-18 | 1.7 |
| LAK cells PMA/ionomycin | 8.4 |
| NK Cells IL-2 rest | 18.0 |
| Two Way MLR 3 day | 8.8 |
| Two Way MLR 5 day | 2.1 |
| Two Way MLR 7 day | |
| PBMC rest | 4.5 |
| PBMC PWM | 0.9 |
| PBMC PHA-L | 0.6 |
| Ramos (B cell) none | 0.0 |
| Ramos (B cell) ionomycin | 0.0 |
| B lymphocytes PWM | |
| B lymphocytes CD40L and IL-4 | 0.2 |
| EOL-1 dbcAMP | 17.2 |
| EOL-1 dbcAMP PMA/ionomycin | 5.9 |
| Dendritic cells none | 12.6 |
| Dendritic cells LPS | 2.3 |
| Dendritic cells anti-CD40 | 6.1 |
| Monocytes rest | 12.1 |
| Monocytes LPS | 13.0 |
| Macrophages rest | 2.4 |
| Macrophages LPS | 1.9 |
| HUVEC none | 0.0 |
| HUVEC starved | 0.0 |
| HUVEC IL-1beta | 0.0 |
| HUVEC IFN gamma | 0.0 |
| HUVEC TNF alpha + IFN gamma | 0.0 |
| HUVEC TNF alpha + IL4 | 0.0 |
| HUVEC IL-11 | 0.0 |
| Lung Microvascular EC none | 0.0 |
| Lung Microvascular EC TNFalpha + IL-1beta | 0.0 |
| Microvascular Dermal EC none | 0.0 |
| Microsvasular Dermal EC TNFalpha + IL-1beta | 0.0 |
| Bronchial epithelium TNFalpha + IL1beta | 0.0 |
| Small airway epithelium none | 0.0 |
| Small airway epithelium TNFalpha + IL-1beta | 0.0 |
| Coronery artery SMC rest | 0.0 |
| Coronery artery SMC TNFalpha + IL-1beta | 0.0 |
| Astrocytes rest | 0.0 |
| Astrocytes TNFalpha + IL-1beta | 0.0 |
| KU-812 (Basophil) rest | 0.0 |
| KU-812 (Basophil) PMA/ionomycin | 0.3 |
| CCD1106 (Keratinocytes) none | 0.0 |
| CCD1106 (Keratinocytes) TNFalpha + IL-1beta | 0.0 |
| Liver cirrhosis | 0.0 |
| NCI-H292 none | 0.0 |
| NCI-H292 IL-4 | 0.0 |
| NCI-H292 IL-9 | 0.0 |
| NCI-H292 IL-13 | 0.0 |
| NCI-H292 IFN gamma | 0.0 |
| HPAEC none | 0.0 |
| HPAEC TNF alpha + IL-1 beta | 0.0 |
| Lung fibroblast none | 0.0 |
| Lung fibroblast TNF alpha + IL-1 beta | 0.0 |
| Lung fibroblast IL-4 | 0.0 |
| Lung fibroblast IL-9 | 0.0 |
| Lung fibroblast IL-13 | 0.0 |
| Lung fibroblast IFN gamma | 0.0 |
| Dermal fibroblast CCD1070 rest | 0.0 |
| Dermal fibroblast CCD1070 TNF alpha | 32.3 |
| Dermal fibroblast CCD1070 IL-1 beta | 0.0 |
| Dermal fibroblast IFN gamma | 0.0 |
| Dermal fibroblast IL-4 | 0.0 |
| Dermal Fibroblasts rest | 0.0 |
| Neutrophils TNFa + LPS | 30.8 |
| Neutrophils rest | 100.0 |
| Colon | 0.0 |
| Lung | 0.7 |
| Thymus | 1.3 |
| Kidney | 0.1 |

[0618] CNS_neurodegeneration_v1.0 Summary: Ag7882 Low expression of this gene is seen in temporal cortex of an Alzheimer's patient. Therefore, therapeutic modulation of this gene or its protein product may be useful in the treatment of Alzheimer's diseases.

[0619] General_screening_panel_v1.7 Summary: Ag7882 High expression of this gene is seen exclusively in a melanoma SK-MEL-5 cell line (CT=26). Therefore, expression of this gene may be used as diagnostic marker to detect presence of melanoma and therapeutic modulation of this gene or its protein product may be useful in the treatment of melanoma.

[0620] Panel 4.1D Summary: Ag7882 Highest expression of this gene is detected in resting neutrophils (CT=29.7). Significant but reduced expression of this gene is also seen in activated neutrophils. In addition, moderate to low expression of this gene is also seen in secondary polarized T cells, memory T cells, LAK cells, resting IL-2 treated NK cells, resting PBMC cells, eosinophils, dendritic cell, monocytes and activated dermal fibroblasts. Therefore, the gene product may reduce activation of these inflammatory cells and be useful as a protein therapeutic to reduce or eliminate the symptoms in patients with Crohii's disease, ulcerative colitis, multiple sclerosis, chronic obstructive pulmonary disease, asthma, emphysema, rheumatoid arthritis, lupus erythematosus, or psoriasis. In addition, small molecule or antibody antagonists of this gene product may be effective in increasing the immune response in patients with AIDS or other immunodeficiencies.

[0621] B. CG134632-01: dUTPase (Mitochondrial Form).

[0622] Expression of gene CG134632-01 was assessed using the primer-probe set Ag6505, described in Table BA. Results of the RTQ-PCR runs are shown in Tables BB, BC and BD.

TABLE BA
Probe Name Ag6505

| | | | Start | SEQ ID |
|---|---|---|---|---|
| Primers | Sequences | Length | Positions | No |
| Forward | 5′-tgctaccatttccttacgtctct-3′ | 23 | 442 | 136 |
| Probe | TET-5′-cttcgctcagcgatgcaaaacgc-3′-TAMRA | 23 | 466 | 137 |
| Reverse | 5′-cctggcccggagagtac-3′17 | 520 | 138 | |

[0623] TABLE BB
General_screening_panel_v1.6

| | Rel. Exp. (%) |
|---|---|
| | Ag6505, Run |
| Tissue Name | 277252458 |
| Adipose | 1.1 |
| Melanoma* Hs688(A).T | 15.2 |
| Melanoma* Hs688(B).T | 12.8 |
| Melanoma* M14 | 43.8 |
| Melanoma* LOXIMVI | 7.3 |
| Melanoma* SK-MEL-5 | 3.5 |
| Squamous cell carcinoma SCC-4 | 4.9 |
| Testis Pool | 3.7 |
| Prostate ca.* (bone met) PC-3 | 5.0 |
| Prostate Pool | 4.7 |
| Placenta | 5.1 |
| Uterus Pool | 3.7 |
| Ovarian ca. OVCAR-3 | 36.6 |
| Ovarian ca. SK-OV-3 | 36.6 |
| Ovarian ca. OVCAR-4 | 7.2 |
| Ovarian ca. OVCAR-5 | 54.7 |
| Ovarian ca. IGROV-1 | 34.2 |
| Ovarian ca. OVCAR-8 | 100.0 |
| Ovary | 10.1 |
| Breast ca. MCF-7 | 6.8 |
| Breast ca. MDA-MB-231 | 15.2 |
| Breast ca. BT 549 | 6.5 |
| Breast ca. T47D | 5.3 |
| Breast ca. MDA-N | 35.8 |
| Breast Pool | 13.0 |
| Trachea | 6.3 |
| Lung | 0.8 |
| Fetal Lung | 9.2 |
| Lung ca. NCI-N417 | 12.4 |
| Lung ca. LX-1 | 15.9 |
| Lung ca. NCI-H146 | 9.7 |
| Lung ca. SHP-77 | 10.1 |
| Lung ca. A549 | 14.4 |
| Lung ca. NCI-H526 | 7.6 |
| Lung ca. NCI-H23 | 7.6 |
| Lung ca. NCI-H460 | 12.6 |
| Lung ca. HOP-62 | 5.2 |
| Lung ca. NCI-H522 | 8.9 |
| Liver | 0.5 |
| Fetal Liver | 4.5 |
| Liver ca. HepG2 | 4.3 |
| Kidney Pool | 19.2 |
| Fetal Kidney | 7.9 |
| Renal ca. 786-0 | 8.9 |
| Renal ca. A498 | 5.8 |
| Renal ca. ACHN | 9.7 |
| Renal ca. UO-31 | 9.2 |
| Renal ca. TK-10 | 11.0 |
| Bladder | 4.0 |
| Gastric ca. (liver met.) NCI-N87 | 19.9 |
| Gastric ca. KATO III | 7.7 |
| Colon ca. SW-948 | 2.8 |
| Colon ca. SW480 | 25.0 |
| Colon ca.* (SW480 met) SW620 | 12.1 |
| Colon ca. HT29 | 9.5 |
| Colon ca. HCT-116 | 7.9 |
| Colon ca. CaCo-2 | 3.8 |
| Colon cancer tissue | 12.0 |
| Colon ca. SW1116 | 5.9 |
| Colon ca. Colo-205 | 11.9 |
| Colon ca. SW-48 | 1.8 |
| Colon Pool | 10.3 |
| Small Intestine Pool | 8.8 |
| Stomach Pool | 5.1 |
| Bone Marrow Pool | 3.5 |
| Fetal Heart | 6.2 |
| Heart Pool | 7.2 |
| Lymph Node Pool | 13.8 |
| Fetal Skeletal Muscle | 3.1 |
| Skeletal Muscle Pool | 1.0 |
| Spleen Pool | 8.6 |
| Thymus Pool | 11.0 |
| CNS cancer (glio/astro) U87-MG | 41.2 |
| CNS cancer (glio/astro) U-118-MG | 24.8 |
| CNS cancer (neuro; met) SK-N-AS | 15.9 |
| CNS cancer (astro) SF-539 | 13.6 |
| CNS cancer (astro) SNB-75 | 38.2 |
| CNS cancer (glio) SNB-19 | 38.2 |
| CNS cancer (glio) SF-295 | 12.9 |
| Brain (Amygdala) Pool | 9.8 |
| Brain (cerebellum) | 12.9 |
| Brain (fetal) | 9.9 |
| Brain (Hippocampus) Pool | 8.1 |
| Cerebral Cortex Pool | 7.0 |
| Brain (Substantia nigra) Pool | 13.9 |
| Brain (Thalamus) Pool | 15.0 |
| Brain (whole) | 7.1 |
| Spinal Cord Pool | 10.6 |
| Adrenal Gland | 7.7 |
| Pituitary gland Pool | 4.7 |
| Salivary Gland | 4.2 |
| Thyroid (female) | 12.7 |
| Pancreatic ca. CAPAN2 | 10.0 |
| Pancreas Pool | 6.7 |

[0624] TABLE BC
Panel 4.1D

| | Rel. Exp. (%) |
|---|---|
| | Ag6505, Run |
| Tissue Name | 271410126 |
| Secondary Th1 act | 52.5 |
| Secondary Th2 act | 76.3 |
| Secondary Tr1 act | 34.4 |
| Secondary Th1 rest | 14.5 |
| Secondary Th2 rest | 11.8 |
| Secondary Tr1 rest | 8.5 |
| Primary Th1 act | 23.2 |
| Primary Th2 act | 80.1 |
| Primary Tr1 act | 85.3 |
| Primary Th1 rest | 3.8 |
| Primary Th2 rest | 10.2 |
| Primary Tr1 rest | 4.2 |
| CD45RA CD4 lymphocyte act | 43.2 |
| CD45RO CD4 lymphocyte act | 72.2 |
| CD8 lymphocyte act | 10.4 |
| Secondary CD8 lymphocyte rest | 18.2 |
| Secondary CD8 lymphocyte act | 14.0 |
| CD4 lymphocyte none | 11.6 |
| 2ry Th1/Th2/Tr1_anti-CD95 CH11 | 10.6 |
| LAK cells rest | 23.8 |
| LAK cells IL-2 | 18.8 |
| LAK cells IL-2 + IL-12 | 0.0 |
| LAK cells IL-2 + IFN gamma | 45.4 |
| LAK cells IL-2 + IL-18 | 12.9 |
| LAK cells PMA/ionomycin | 34.6 |
| NK Cells IL-2 rest | 68.3 |
| Two Way MLR 3 day | 31.6 |
| Two Way MLR 5 day | 4.5 |
| Two Way MLR 7 day | 22.2 |
| PBMC rest | 2.2 |
| PBMC PWM | 23.5 |
| PBMC PHA-L | 19.6 |
| Ramos (B cell) none | 28.7 |
| Ramos (B cell) ionomycin | 67.8 |
| B lymphocytes PWM | 20.6 |
| B lymphocytes CD40L and IL-4 | 65.1 |
| EOL-1 dbcAMP | 34.4 |
| EOL-1 dbcAMP PMA/ionomycin | 6.9 |
| Dendritic cells none | 13.9 |
| Dendritic cells LPS | 7.2 |
| Dendritic cells anti-CD40 | 9.6 |
| Monocytes rest | 21.8 |
| Monocytes LPS | 9.3 |
| Macrophages rest | 6.5 |
| Macrophages LPS | 8.5 |
| HUVEC none | 33.4 |
| HUVEC starved | 27.9 |
| HUVEC IL-1beta | 36.6 |
| HUVEC IFN gamma | 34.2 |
| HUVEC TNF alpha + IFN gamma | 13.4 |
| HUVEC TNF alpha + IL4 | 14.1 |
| HUVEC IL-11 | 28.5 |
| Lung Microvascular EC none | 100.0 |
| Lung Microvascular EC TNFalpha + IL-1beta | 21.2 |
| Microvascular Dermal EC none | 10.3 |
| Microsvasular Dermal EC TNFalpha + IL-1beta | 20.9 |
| Bronchial epithelium TNFalpha + IL1beta | 18.4 |
| Small airway epithelium none | 23.2 |
| Small airway epithelium TNFalpha + IL-1beta | 61.6 |
| Coronery artery SMC rest | 40.3 |
| Coronery artery SMC TNFalpha + IL-1beta | 55.1 |
| Astrocytes rest | 12.7 |
| Astrocytes TNFalpha + IL-1beta | 5.6 |
| KU-812 (Basophil) rest | 53.2 |
| KU-812 (Basophil) PMA/ionomycin | 51.4 |
| CCD1106 (Keratinocytes) none | 12.3 |
| CCD1106 (Keratinocytes) TNFalpha + IL-1beta | 29.7 |
| Liver cirrhosis | 9.2 |
| NCI-H292 none | 98.6 |
| NCI-H292 IL-4 | 77.9 |
| NCI-H292 IL-9 | 62.4 |
| NCI-H292 IL-13 | 100.0 |
| NCI-H292 IFN gamma | 45.1 |
| HPAEC none | 19.2 |
| HPAEC TNF alpha + IL-1 beta | 44.4 |
| Lung fibroblast none | 39.0 |
| Lung fibroblast TNF alpha + IL-1 beta | 53.2 |
| Lung fibroblast IL-4 | 4.4 |
| Lung fibroblast IL-9 | 15.8 |
| Lung fibroblast IL-13 | 21.6 |
| Lung fibroblast IFN gamma | 36.3 |
| Dermal fibroblast CCD1070 rest | 25.9 |
| Dermal fibroblast CCD1070 TNF alpha | 74.7 |
| Dermal fibroblast CCD1070 IL-1 beta | 36.9 |
| Dermal fibroblast IFN gamma | 72.2 |
| Dermal fibroblast IL-4 | 42.6 |
| Dermal Fibroblasts rest | 53.2 |
| Neutrophils TNFa + LPS | 4.2 |
| Neutrophils rest | 10.9 |
| Colon | 10.3 |
| Lung | 5.9 |
| Thymus | 5.8 |
| Kidney | 70.2 |

[0625] TABLE BD
Panel CNS_1.1

| | Rel. Exp. (%) |
|---|---|
| | Ag6505, Run |
| Tissue Name | 271956643 |
| Cing Gyr Depression2 | 8.9 |
| Cing Gyr Depression | 2.4 |
| Cing Gyr PSP2 | 7.9 |
| Cing Gyr PSP | 15.4 |
| Cing Gyr Huntington's2 | 22.2 |
| Cing Gyr Huntington's | 54.3 |
| Cing Gyr Parkinson's2 | 31.4 |
| Cing Gyr Parkinson's | 33.4 |
| Cing Gyr Alzheimer's2 | 13.2 |
| Cing Gyr Alzheimer's | 14.6 |
| Cing Gyr Control2 | 25.5 |
| Cing Gyr Control | 66.9 |
| Temp Pole Depression2 | 3.9 |
| Temp Pole PSP2 | 7.8 |
| Temp Pole PSP | 0.0 |
| Temp Pole Huntington's | 28.5 |
| Temp Pole Parkinson's2 | 39.0 |
| Temp Pole Parkinson's | 18.8 |
| Temp Pole Alzheimer's2 | 9.5 |
| Temp Pole Alzheimer's | 12.2 |
| Temp Pole Control2 | 29.5 |
| Temp Pole Control | 16.4 |
| Glob Palladus Depression | 8.6 |
| Glob Palladus PSP2 | 5.7 |
| Glob Palladus PSP | 4.8 |
| Glob Palladus Parkinson's2 | 18.4 |
| Glob Palladus Parkinson's | 90.8 |
| Glob Palladus Alzheimer's2 | 10.5 |
| Glob Palladus Alzheimer's | 10.4 |
| Glob Palladus Control2 | 9.5 |
| Glob Palladus Control | 30.6 |
| Sub Nigra Depression2 | 2.1 |
| Sub Nigra Depression | 6.3 |
| Sub Nigra PSP2 | 11.1 |
| Sub Nigra Huntington's2 | 61.1 |
| Sub Nigra Huntington's | 35.6 |
| Sub Nigra Parkinson's2 | 33.9 |
| Sub Nigra Alzheimer's2 | 12.9 |
| Sub Nigra Control2 | 17.8 |
| Sub Nigra Control | 45.1 |
| BA17 Depression2 | 28.5 |
| BA17 Depression | 5.1 |
| BA17 PSP2 | 10.6 |
| BA17 PSP | 14.0 |
| BA17 Huntington's2 | 17.2 |
| BA17 Huntington's | 22.4 |
| BA17 Parkinson's2 | 47.0 |
| BA17 Parkinson's | 79.6 |
| BA17 Alzheimer's2 | 11.1 |
| BA17 Control2 | 23.8 |
| BA17 Control | 28.3 |
| BA9 Depression2 | 4.9 |
| BA9 Depression | 10.4 |
| BA9 PSP2 | 1.8 |
| BA9 PSP | 4.2 |
| BA9 Huntington's2 | 21.2 |
| BA9 Huntington's | 32.8 |
| BA9 Parkinson's2 | 16.4 |
| BA9 Parkinson's | 34.4 |
| BA9 Alzheimer's2 | 28.5 |
| BA9 Alzheimer's | 7.7 |
| BA9 Control2 | 54.7 |
| BA9 Control | 37.4 |
| BA7 Depression | 7.0 |
| BA7 PSP2 | 17.6 |
| BA7 PSP | 8.7 |
| BA7 Huntington's2 | 100.0 |
| BA7 Huntington's | 31.4 |
| BA7 Parkinson's2 | 32.1 |
| BA7 Parkinson's | 28.9 |
| BA7 Alzheimer's2 | 7.8 |
| BA7 Control2 | 24.1 |
| BA7 Control | 37.1 |
| BA4 Depression2 | 10.8 |
| BA4 Depression | 13.2 |
| BA4 PSP2 | 3.8 |
| BA4 PSP | 8.2 |
| BA4 Huntington's2 | 25.2 |
| BA4 Huntington's | 13.2 |
| BA4 Parkinson's2 | 42.9 |
| BA4 Parkinson's | 41.5 |
| BA4 Alzheimer's2 | 2.8 |
| BA4 Control2 | 33.0 |
| BA4 Control | 20.9 |

[0626] General_screening anel_v1.6 Summary: Ag6505 Highest expression of this gene is detected in a ovarian cancer OVCAR-8 cell line (CT=29.7). Moderate to low levels of expression of this gene is also seen in cluster of cancer cell lines derived from pancreatic, gastric, colon, lung, liver, renal, breast, ovarian, prostate, squamous cell carcinoma, melanoma and brain cancers. Thus, expression of this gene could be used as a marker to detect the presence of these cancers. Furthermore, therapeutic modulation of the expression or function of this gene may be effective in the treatment of pancreatic, gastric, colon, lung, liver, renal, breast, ovarian, prostate, squamous cell carcinoma, melanoma and brain cancers.

[0627] Among tissues with metabolic or endocrine function, this gene is expressed at moderate to low levels in pancreas, adrenal gland, thyroid, pituitary gland, fetal skeletal muscle, heart, fetal liver and the gastrointestinal tract. Therefore, therapeutic modulation of the activity of this gene may prove useful in the treatment of endocrine/metabolically related diseases, such as obesity and diabetes.

[0628] In addition, this gene is expressed at moderate levels in all regions of the central nervous system examined, including amygdala, hippocampus, substantia nigra, thalamus, cerebellum, cerebral cortex, and spinal cord. Therefore, therapeutic modulation of this gene product may be useful in the treatment of central nervous system disorders such as Alzheimer's disease, Parkinson's disease, epilepsy, multiple sclerosis, schizophrenia and depression.

[0629] Panel 4.1D Summary: Ag6505 Highest expression of the CG134632-01 gene is detected in lung microvascular endothelial cells and IL-9 treated NCI-H292 cells (CTs=33.6). In addition, low levels of expression of this gene is also seen in activated primary and secondary Th1 and Th2 cells, activated CD4 lymphocytes, IL2 treated NK cells, TNFalpha+IL-1beta treated small airway epithelium and HPAEC cells, coronery artery SMC, basophils, TNFalpha +IL-1beta treated lung fibroblasts, and dermnal fibroblasts. Therefore, therapeutic modulation of this gene product may be useful in the treatment of autoimmune and inflammatory diseases such as asthma, allergies, inflammatory bowel disease, lupus erythematosus, psoriasis, rheumatoid arthritis, and osteoarthritis.

[0630] Low levels of expression of this gene is also seen in kidney. Therefore, small molecule therapies designed with the protein encoded for by this gene could modulate kidney function and be important in the treatment of inflammatory or autoimmune diseases that affect the kidney, including lupus and glomerulonephritis.

[0631] Panel CNS_{—}1.1 Summary: Ag6505 This panel confirms the expression of the CG134632-01 gene at low levels in the brains of an independent group of individuals. Therefore, therapeutic modulation of this gene may be useful in the treatment of neurological disorder.

[0632] C. CG154077-01: SUR2.

[0633] Expression of gene CG154077-01 was assessed using the primer-probe set Ag5693, described in Table CA. Results of the RTQ-PCR runs are shown in Tables CB, CC, CD and CE.

TABLE CA
Probe Name Ag5693

| | | | | SEQ |
|---|---|---|---|---|
| | | | Start | ID |
| Primers | Sequences | Length | Positions | No |
| Forward | 5′-ctgtcacagatgcctgttctct-3′ | 22 | 2348 | 139 |
| Probe | TET-5′-cagccagatattgacttattaccatttgga-3′-TAMRA | 30 | 2371 | 140 |
| Reverse | 5′-cctctctccaatttcagtttga-3′ | 22 | 2403 | 141 |

[0634] TABLE CB
General_screening_panel_v1.5

| | Rel. Exp. (%) |
|---|---|
| | Ag5693, Run |
| Tissue Name | 246263980 |
| Adipose | 18.2 |
| Melanoma* Hs688(A).T | 31.2 |
| Melanoma* Hs688(B).T | 18.0 |
| Melanoma* M14 | 0.0 |
| Melanoma* LOXIMVI | 0.1 |
| Melanoma* SK-MEL-5 | 0.0 |
| Squamous cell carcinoma SCC-4 | 0.0 |
| Testis Pool | 0.7 |
| Prostate ca.* (bone met) PC-3 | 0.0 |
| Prostate Pool | 9.1 |
| Placenta | 0.1 |
| Uterus Pool | 51.4 |
| Ovarian ca. OVCAR-3 | 0.0 |
| Ovarian ca. SK-OV-3 | 0.0 |
| Ovarian ca. OVCAR-4 | 0.0 |
| Ovarian ca. OVCAR-5 | 0.0 |
| Ovarian ca. IGROV-1 | 0.0 |
| Ovarian ca. OVCAR-8 | 0.0 |
| Ovary | 13.4 |
| Breast ca. MCF-7 | 0.1 |
| Breast ca. MDA-MB-231 | 0.4 |
| Breast ca. BT 549 | 0.0 |
| Breast ca. T47D | 0.0 |
| Breast ca. MDA-N | 0.0 |
| Breast Pool | 29.3 |
| Trachea | 5.9 |
| Lung | 6.5 |
| Fetal Lung | 54.7 |
| Lung ca. NCI-N417 | 0.0 |
| Lung ca. LX-1 | 1.6 |
| Lung ca. NCI-H146 | 0.0 |
| Lung ca. SHP-77 | 0.0 |
| Lung ca. A549 | 0.3 |
| Lung ca. NCI-H526 | 0.0 |
| Lung ca. NCI-H23 | 0.0 |
| Lung ca. NCI-H460 | 2.8 |
| Lung ca. HOP-62 | 0.0 |
| Lung ca. NCI-H522 | 0.0 |
| Liver | 9.5 |
| Fetal Liver | 3.7 |
| Liver ca. HepG2 | 0.0 |
| Kidney Pool | 98.6 |
| Fetal Kidney | 35.6 |
| Renal ca. 786-0 | 0.1 |
| Renal ca. A498 | 0.0 |
| Renal ca. ACHN | 1.2 |
| Renal ca. UO-31 | 0.0 |
| Renal ca. TK-10 | 0.0 |
| Bladder | 13.0 |
| Gastric ca. (liver met.) NCI-N87 | 0.0 |
| Gastric ca. KATO III | 0.0 |
| Colon ca. SW-948 | 0.0 |
| Colon ca. SW480 | 0.7 |
| Colon ca.* (SW480 met) SW620 | 0.5 |
| Colon ca. HT29 | 0.0 |
| Colon ca. HCT-116 | 0.0 |
| Colon ca. CaCo-2 | 39.5 |
| Colon cancer tissue | 7.5 |
| Colon ca. SW1116 | 0.0 |
| Colon ca. Colo-205 | 0.0 |
| Colon ca. SW-48 | 0.0 |
| Colon Pool | 45.4 |
| Small Intestine Pool | 38.4 |
| Stomach Pool | 19.5 |
| Bone Marrow Pool | 18.2 |
| Fetal Heart | 61.1 |
| Heart Pool | 40.1 |
| Lymph Node Pool | 50.7 |
| Fetal Skeletal Muscle | 32.8 |
| Skeletal Muscle Pool | 100.0 |
| Spleen Pool | 12.9 |
| Thymus Pool | 14.9 |
| CNS cancer (glio/astro) U87-MG | 0.1 |
| CNS cancer (glio/astro) U-118-MG | 4.9 |
| CNS cancer (neuro; met) SK-N-AS | 3.3 |
| CNS cancer (astro) SF-539 | 0.0 |
| CNS cancer (astro) SNB-75 | 0.0 |
| CNS cancer (glio) SNB-19 | 0.0 |
| CNS cancer (glio) SF-295 | 0.1 |
| Brain (Amygdala) Pool | 2.3 |
| Brain (cerebellum) | 1.4 |
| Brain (fetal) | 4.2 |
| Brain (Hippocampus) Pool | 1.9 |
| Cerebral Cortex Pool | 6.3 |
| Brain (Substantia nigra) Pool | 3.6 |
| Brain (Thalamus) Pool | 1.9 |
| Brain (whole) | 0.3 |
| Spinal Cord Pool | 8.0 |
| Adrenal Gland | 6.3 |
| Pituitary gland Pool | 2.3 |
| Salivary Gland | 0.6 |
| Thyroid (female) | 2.2 |
| Pancreatic ca. CAPAN2 | 0.0 |
| Pancreas Pool | 34.4 |

[0635] TABLE CC
General_screening_panel_v1.6

| | Rel. Exp. (%) |
|---|---|
| | Ag5693, Run |
| Tissue Name | 277231841 |
| Adipose | 28.3 |
| Melanoma* Hs688(A).T | 36.3 |
| Melanoma* Hs688(B).T | 16.6 |
| Melanoma* M14 | 0.0 |
| Melanoma* LOXIMVI | 0.0 |
| Melanoma* SK-MEL-5 | 0.0 |
| Squamous cell carcinoma SCC-4 | 0.0 |
| Testis Pool | 7.3 |
| Prostate ca.* (bone met) PC-3 | 0.0 |
| Prostate Pool | 13.4 |
| Placenta | 0.4 |
| Uterus Pool | 14.8 |
| Ovarian ca. OVCAR-3 | 0.0 |
| Ovarian ca. SK-OV-3 | 0.0 |
| Ovarian ca. OVCAR-4 | 0.0 |
| Ovarian ca. OVCAR-5 | 0.0 |
| Ovarian ca. IGROV-1 | 0.0 |
| Ovarian ca. OVCAR-8 | 0.0 |
| Ovary | 11.2 |
| Breast ca. MCF-7 | 0.2 |
| Breast ca. MDA-MB-231 | 0.3 |
| Breast ca. BT 549 | 0.0 |
| Breast ca. T47D | 0.0 |
| Breast ca. MDA-N | 0.0 |
| Breast Pool | 40.1 |
| Trachea | 5.6 |
| Lung | 6.8 |
| Fetal Lung | 50.7 |
| Lung ca. NCI-N417 | 0.0 |
| Lung ca. LX-1 | 0.8 |
| Lung ca. NCI-H146 | 0.0 |
| Lung ca. SHP-77 | 0.0 |
| Lung ca. A549 | 0.3 |
| Lung ca. NCI-H526 | 0.0 |
| Lung ca. NCI-H23 | 0.0 |
| Lung ca. NCI-H460 | 49.0 |
| Lung ca. HOP-62 | 0.1 |
| Lung ca. NCI-H522 | 0.0 |
| Liver | 9.3 |
| Fetal Liver | 4.0 |
| Liver ca. HepG2 | 0.0 |
| Kidney Pool | 100.0 |
| Fetal Kidney | 41.5 |
| Renal ca. 786-0 | 0.0 |
| Renal ca. A498 | 0.0 |
| Renal ca. ACHN | 8.8 |
| Renal ca. UO-31 | 0.1 |
| Renal ca. TK-10 | 0.0 |
| Bladder | 14.1 |
| Gastric ca. (liver met.) NCI-N87 | 0.0 |
| Gastric ca. KATO III | 0.0 |
| Colon ca. SW-948 | 0.0 |
| Colon ca. SW480 | 0.5 |
| Colon ca.* (SW480 met) SW620 | 0.9 |
| Colon ca. HT29 | 0.0 |
| Colon ca. HCT-116 | 0.0 |
| Colon ca. CaCo-2 | 47.6 |
| Colon cancer tissue | 7.1 |
| Colon ca. SW1116 | 0.0 |
| Colon ca. Colo-205 | 0.0 |
| Colon ca. SW-48 | 0.0 |
| Colon Pool | 44.8 |
| Small Intestine Pool | 48.6 |
| Stomach Pool | 23.7 |
| Bone Marrow Pool | 22.4 |
| Fetal Heart | 84.1 |
| Heart Pool | 46.7 |
| Lymph Node Pool | 55.5 |
| Fetal Skeletal Muscle | 37.4 |
| Skeletal Muscle Pool | 15.5 |
| Spleen Pool | 11.5 |
| Thymus Pool | 15.1 |
| CNS cancer (glio/astro) U87-MG | 0.2 |
| CNS cancer (glio/astro) U-118-MG | 5.6 |
| CNS cancer (neuro; met) SK-N-AS | 2.9 |
| CNS cancer (astro) SF-539 | 0.0 |
| CNS cancer (astro) SNB-75 | 0.0 |
| CNS cancer (glio) SNB-19 | 0.0 |
| CNS cancer (glio) SF-295 | 0.0 |
| Brain (Amygdala) Pool | 3.5 |
| Brain (cerebellum) | 2.1 |
| Brain (fetal) | 6.8 |
| Brain (Hippocampus) Pool | 5.9 |
| Cerebral Cortex Pool | 8.2 |
| Brain (Substantia nigra) Pool | 4.3 |
| Brain (Thalamus) Pool | 8.7 |
| Brain (whole) | 7.1 |
| Spinal Cord Pool | 8.8 |
| Adrenal Gland | 7.0 |
| Pituitary gland Pool | 2.3 |
| Salivary Gland | 0.6 |
| Thyroid (female) | 3.4 |
| Pancreatic ca. CAPAN2 | 0.0 |
| Pancreas Pool | 6.2 |

[0636] TABLE CD
Panel 4.1D

| | Rel. Exp. (%) |
|---|---|
| | Ag5693, Run |
| Tissue Name | 268722540 |
| Secondary Th1 act | 1.6 |
| Secondary Th2 act | 0.0 |
| Secondary Tr1 act | 0.0 |
| Secondary Th1 rest | 0.0 |
| Secondary Th2 rest | 0.0 |
| Secondary Tr1 rest | 0.0 |
| Primary Th1 act | 0.0 |
| Primary Th2 act | 0.0 |
| Primary Tr1 act | 0.0 |
| Primary Th1 rest | 0.0 |
| Primary Th2 rest | 0.0 |
| Primary Tr1 rest | 0.0 |
| CD45RA CD4 lymphocyte act | 21.5 |
| CD45RO CD4 lymphocyte act | 0.0 |
| CD8 lymphocyte act | 0.0 |
| Secondary CD8 lymphocyte rest | 0.0 |
| Secondary CD8 lymphocyte act | 0.0 |
| CD4 lymphocyte none | 0.0 |
| 2ry Th1/Th2/Tr1_anti-CD95 CH11 | 0.0 |
| LAK cells rest | 0.0 |
| LAK cells IL-2 | 0.0 |
| LAK cells IL-2 + IL-12 | 0.0 |
| LAK cells IL-2 + IFN gamma | 0.0 |
| LAK cells IL-2 + IL-18 | 0.0 |
| LAK cells PMA/ionomycin | 0.0 |
| NK Cells IL-2 rest | 0.0 |
| Two Way MLR 3 day | 0.0 |
| Two Way MLR 5 day | 0.0 |
| Two Way MLR 7 day | 0.0 |
| PBMC rest | 0.0 |
| PBMC PWM | 0.0 |
| PBMC PHA-L | 0.0 |
| Ramos (B cell) none | 0.0 |
| Ramos (B cell) ionomycin | 0.0 |
| B lymphocytes PWM | 0.0 |
| B lymphocytes CD40L and IL-4 | 0.0 |
| EOL-1 dbcAMP | 0.0 |
| EOL-1 dbcAMP PMA/ionomycin | 0.0 |
| Dendritic cells none | 0.0 |
| Dendritic cells LPS | 0.0 |
| Dendritic cells anti-CD40 | 0.0 |
| Monocytes rest | 0.0 |
| Monocytes LPS | 0.0 |
| Macrophages rest | 0.0 |
| Macrophages LPS | 0.0 |
| HUVEC none | 0.0 |
| HUVEC starved | 0.0 |
| HUVEC IL-1beta | 0.0 |
| HUVEC IFN gamma | 0.0 |
| HUVEC TNF alpha + IFN gamma | 0.0 |
| HUVEC TNF alpha + IL4 | 0.0 |
| HUVEC IL-11 | 0.0 |
| Lung Microvascular EC none | 0.0 |
| Lung Microvascular EC TNFalpha + IL-1beta | 0.0 |
| Microvascular Dermal EC none | 0.0 |
| Microsvasular Dermal EC TNFalpha + IL-1beta | 0.0 |
| Bronchial epithelium TNFalpha + IL1beta | 3.4 |
| Small airway epithelium none | 1.5 |
| Small airway epithelium TNFalpha + IL-1beta | 0.0 |
| Coronery artery SMC rest | 8.6 |
| Coronery artery SMC TNFalpha + IL-1beta | 10.4 |
| Astrocytes rest | 0.0 |
| Astrocytes TNFalpha + IL-1beta | 0.0 |
| KU-812 (Basophil) rest | 0.0 |
| KU-812 (Basophil) PMA/ionomycin | 0.0 |
| CCD1106 (Keratinocytes) none | 0.0 |
| CCD1106 (Keratinocytes) TNFalpha + IL-1beta | 0.0 |
| Liver cirrhosis | 100.0 |
| NCI-H292 none | 0.0 |
| NCI-H292 IL-4 | 0.0 |
| NCI-H292 IL-9 | 0.0 |
| NCI-H292 IL-13 | 0.0 |
| NCI-H292 IFN gamma | 0.0 |
| HPAEC none | 0.0 |
| HPAEC TNF alpha + IL-1 beta | 0.0 |
| Lung fibroblast none | 73.2 |
| Lung fibroblast TNF alpha + IL-1 beta | 2.4 |
| Lung fibroblast IL-4 | 23.0 |
| Lung fibroblast IL-9 | 57.4 |
| Lung fibroblast IL-13 | 21.9 |
| Lung fibroblast IFN gamma | 86.5 |
| Dermal fibroblast CCD1070 rest | 74.7 |
| Dermal fibroblast CCD1070 TNF alpha | 60.3 |
| Dermal fibroblast CCD1070 IL-1 beta | 29.1 |
| Dermal fibroblast IFN gamma | 0.0 |
| Dermal fibroblast IL-4 | 5.1 |
| Dermal Fibroblasts rest | 8.0 |
| Neutrophils TNFa + LPS | 0.0 |
| Neutrophils rest | 0.0 |
| Colon | 27.9 |
| Lung | 94.6 |
| Thymus | 8.7 |
| Kidney | 69.7 |

[0637] TABLE CE
Panel 5 Islet

| | Rel. Exp. (%) |
|---|---|
| | Ag5693, Run |
| Tissue Name | 243564603 |
| 97457_Patient-02go_adipose | 26.2 |
| 97476_Patient-07sk_skeletal muscle | 41.5 |
| 97477_Patient-07ut_uterus | 21.0 |
| 97478_Patient-07pl_placenta | 5.4 |
| 99167_Bayer Patient 1 | 8.7 |
| 97482_Patient-08ut_uterus | 7.7 |
| 97483_Patient-08pl_placenta | 1.5 |
| 97486_Patient-09sk_skeletal muscle | 16.2 |
| 97487_Patient-09ut_uterus | 35.4 |
| 97488_Patient-09pl_placenta | 1.7 |
| 97492_Patient-10ut_uterus | 24.5 |
| 97493_Patient-10pl_placenta | 2.4 |
| 97495_Patient-11go_adipose | 19.3 |
| 97496_Patient-11sk_skeletal muscle | 37.4 |
| 97497_Patient-11ut_uterus | 20.3 |
| 97498_Patient-11pl_placenta | 1.1 |
| 97500_Patient-12go_adipose | 44.1 |
| 97501_Patient-12sk_skeletal muscle | 100.0 |
| 97502_Patient-12ut_uterus | 23.7 |
| 97503_Patient-12pl_placenta | 0.8 |
| 94721_Donor 2 U - A_Mesenchymal Stem Cells | 0.7 |
| 94722_Donor 2 U - B_Mesenchymal Stem Cells | 0.9 |
| 94723_Donor 2 U - C_Mesenchymal Stem Cells | 0.9 |
| 94709_Donor 2 AM - A_adipose | 5.9 |
| 94710_Donor 2 AM - B_adipose | 1.6 |
| 94711_Donor 2 AM - C_adipose | 1.3 |
| 94712_Donor 2 AD - A_adipose | 1.6 |
| 94713_Donor 2 AD - B_adipose | 2.7 |
| 94714_Donor 2 AD - C_adipose | 3.9 |
| 94742_Donor 3 U - A_Mesenchymal Stem Cells | 0.4 |
| 94743_Donor 3 U - B_Mesenchymal Stem Cells | 0.6 |
| 94730_Donor 3 AM - A_adipose | 2.2 |
| 94731_Donor 3 AM - B_adipose | 0.8 |
| 94732_Donor 3 AM - C_adipose | 1.4 |
| 94733_Donor 3 AD - A_adipose | 3.1 |
| 94734_Donor 3 AD - B_adipose | 0.0 |
| 94735_Donor 3 AD - C_adipose | 0.0 |
| 77138_Liver_HepG2untreated | 0.4 |
| 73556_Heart_Cardiac stromal cells (primary) | 0.0 |
| 81735_Small Intestine | 31.2 |
| 72409_Kidney_Proximal Convoluted Tubule | 1.2 |
| 82685_Small intestine_Duodenum | 7.7 |
| 90650_Adrenal_Adrenocortical adenoma | 1.8 |
| 72410_Kidney_HRCE | 1.1 |
| 72411_Kidney_HRE | 0.6 |
| 73139_Uterus_Uterine smooth muscle cells | 3.1 |

[0638] General_screening_panel_v1.5 Summary: Ag5693 Highest expression of this gene is detected in skeletal muscle (CT=29.6). This gene is expressed at moderate to low levels in tissues with metabolic or endocrine function including pancreas, adipose, adrenal gland, thyroid, skeletal muscle, heart, liver and the gastrointestinal tract. This gene codes for sulfonylurea Receptor 2 (SUR2). SUR2 is a member of the superfamily of ATP-binding cassette (ABC) transporters. It functions as a drug-binding regulatory subunit of the muscle specific ATP-sensitive potassium channel. Recent data showed that disruption of SUR2 leads to increased insulin stimulated glucose uptake in skeletal muscle. At Curagen, using GeneCalling studies, SUR2 was found to be up-regulated in fast twitch versus slow twitch muscle in mice on a high fat diet and in diabetic mice. It is known that glucose uptake is reduced in fast twitch muscle as compared to slow twitch muscle. Inhibition of SUR2 would favor slow twitch muscle phenotype, thus increasing glucose uptake and improving insulin sensitivity. Therefore, an antagonist of SUR2 may be an effective therapeutic against insulin resistance and diabetes.

[0639] In addition low expression of this gene is also seen in fetal brain, cerebral cortex, substantia nigra and spinal cord. Therefore, therapeutic modulation of this gene product may be useful in the treatment of central nervous system disorders such as Parkinson's disease, epilepsy, multiple sclerosis, and seizures.

[0640] Low expression of this gene is also seen in some of the cancer cell lines derived from melanoma, colon, and brain cancers. Therefore, therapeutic modulatio of this gene or its protein product through the use of small molecule drug may be useful in the treatment of melanoma, colon and brain cancers.

[0641] See Chutkow W A, Samuel V, Hansen P A, Pu J, Valdivia C R, Makielski J C, Burant C F. Disruption of Sur2-containing K(ATP) channels enhances insulin-stimulated glucose uptake in skeletal muscle. Proc. Natl. Acad. Sci. USA 2001. 98,11760-4. PMID: 11562480; Chutkow W A, Simon M C, Le Beau M M, Burant C F. Cloning, tissue expression, and chromosomal localization of SUR2, the putative drug-binding subunit of cardiac, skeletal muscle, and vascular KATP channels. Diabetes 1996. 45,1439-45. PMID: 8826984; Halseth A E, Bracy D P, Wasserman D H. Functional limitations to glucose uptake in muscles comprised of different fiber types. Am. J. Physiol. Endocrinol. Metab. 2001. 280, E994-9. PMID: 11350781; Shindo T, Yamada M, Isomoto S, Horio Y, Kurachi Y. SUR2 subtype (A and B)-dependent differential activation of the cloned ATP-sensitive K+ channels by pinacidil and nicorandil. Br. J. Pharmacol. 1998. 124, 985-91. PMID: 9692785; Reimann F, Ashcroft F M, Gribble F M. Structural basis for the interference between nicorandil and sulfonylurea action. Diabetes 2001. 50, 2253-9. PMID: 11574406; and Moreau C, Jacquet H, Prost A L, D'hahan N, Vivaudou M. The molecular basis of the specificity of action of K(ATP) channel openers. EMBO J. 2000.19, 6644-51. PMID: 11118199.

[0642] General_screening_panel_v1.6 Summary: Ag5693 Highest expression of this gene is detected in kidney pool (CT=28.3). Expression of this gene in this panel is consistent with that seen in panel 1.5, please see panel 1.5 for further discussion of this gene.

[0643] Panel 4.1D Summary: Ag5693 Highest expression of this gene is detected in liver cirrhosis (CT=33.6). Therefore, therapeutic modulation of this gene or its protein product may be useful in the treatment of liver cirrhosis.

[0644] Low expression of this gene is also seen in resting and activated lung and dermal fibroblast, kidney and lung. Therefore, therapeutic modulation of this gene or its protein product through the use of small molecule drug may be useful in the treatment of autoimmune and inflammatory disorders including psoriasis, lupus erythematosus, chronic obstructive pulmonary disease, asthma, allergy and emphysema.

[0645] Panel 5 Islet Summary: Ag5693 Highest expression of this gene is detected in skeletal muscle of a diabetic patient on insulin (CT=31). This gene is expressed at low levels in adipose and skeletal muscle of non-diabetic, and diabetic patient. The expression level of SUR2 is significantly elevated in diabetic adipose/skeletal muscle (patient 12) compared to non-diabetic individuals. These data further support that up-regulation of SUR2 has pathogenic consequences, and inhibition of SUR2 may be beneficial for the treatment of diabetes.

[0646] D. CG155759-02: Olfactory Receptor.

[0647] Expression of gene CG155759-02 was assessed using the primer-probe set Ag2298, described in Table DA. Please note that CG155759-02 represents a full length physical clone.

TABLE DA
Probe Name Ag2298

| | | | | SEQ |
|---|---|---|---|---|
| | | | Start | ID |
| Primers | Sequences | Length | Positions | No |
| Forward | 5′-ttcttgggagtttagcctttgt-3′ | 22 | 188 | 142 |
| Probe | TET-5′-tgcttggatatcttccacagtaactccca-3′-TAMRA | 29 | 213 | 143 |
| Reverse | 5′-ggccaagaaattaaccaacatt-3′ | 22 | 243 | 144 |

[0648] CNS_neurodegeneration_v1.0 Summary: Ag2298 Expression of this gene is low/undetectable in all samples on this panel (CTs>35).

[0649] Panel 1.3D Summary: Ag2298 Expression of this gene is low/undetectable in all samples on this panel (CTs>35).

[0650] Panel 2.2 Summary: Ag2298 Expression of this gene is low/undetectable in all samples on this panel (CTs>35).

[0651] Panel 4.1D Summary: Ag2298 Expression of this gene is low/undetectable in all samples on this panel (CTs>35).

[0652] Panel 5 Islet Summary: Ag2298 Expression of this gene is low/undetectable in all samples on this panel (CTs>35).

[0653] E. CG155882-01: Olfactory Receptor.

[0654] Expression of gene CG155882-01 was assessed using the primer-probe set Ag2192, described in Table EA. Results of the RTQ-PCR runs are shown in Tables EB, EC, ED and EE.

TABLE EA
Probe Name Ag2192

| | | | Start | SEQ |
|---|---|---|---|---|
| Primers | Sequences | Length | Position | ID No |
| Forward | 5′-tgtattcatgggactcaccaa-3′ | 21 | 45 | 145 |
| Probe | TET-5′-tcacgggagattcagcttctactttt-3′-TAMRA | 26 | 67 | 146 |
| Reverse | 5′-gctcgcaaagtagaacaacaaa-3′ | 22 | 102 | 147 |

[0655] TABLE EB
Panel 1.3D

| | Rel. Exp. (%) |
|---|---|
| | Ag2192, Run |
| Tissue Name | 165725843 |
| Liver adenocarcinoma | 0.0 |
| Pancreas | 0.0 |
| Pancreatic ca. CAPAN 2 | 0.0 |
| Adrenal gland | 0.0 |
| Thyroid | 0.0 |
| Salivary gland | 0.0 |
| Pituitary gland | 0.0 |
| Brain (fetal) | 6.2 |
| Brain (whole) | 0.0 |
| Brain (amygdala) | 0.0 |
| Brain (cerebellum) | 0.0 |
| Brain (hippocampus) | 0.0 |
| Brain (substantia nigra) | 0.0 |
| Brain (thalamus) | 0.0 |
| Cerebral Cortex | 0.0 |
| Spinal cord | 0.0 |
| glio/astro U87-MG | 15.0 |
| glio/astro U-118-MG | 27.9 |
| astrocytoma SW1783 | 14.1 |
| neuro*; met SK-N-AS | 0.0 |
| astrocytoma SF-539 | 0.0 |
| astrocytoma SNB-75 | 0.0 |
| glioma SNB-19 | 0.0 |
| glioma U251 | 96.6 |
| glioma SF-295 | 10.4 |
| Heart (fetal) | 0.0 |
| Heart | 0.0 |
| Skeletal muscle (fetal) | 6.7 |
| Skeletal muscle | 0.0 |
| Bone marrow | 7.2 |
| Thymus | 9.3 |
| Spleen | 0.0 |
| Lymph node | 0.0 |
| Colorectal | 1.8 |
| Stomach | 0.0 |
| Small intestine | 0.0 |
| Colon ca. SW480 | 0.0 |
| Colon ca.* SW620(SW480 met) | 0.0 |
| Colon ca. HT29 | 0.0 |
| Colon ca. HCT-116 | 3.3 |
| Colon ca. CaCo-2 | 0.0 |
| Colon ca. tissue(ODO3866) | 0.0 |
| Colon ca. HCC-2998 | 0.0 |
| Gastric ca.* (liver met) NCI-N87 | 0.0 |
| Bladder | 0.0 |
| Trachea | 0.0 |
| Kidney | 0.0 |
| Kidney (fetal) | 6.5 |
| Renal ca. 786-0 | 21.5 |
| Renal ca. A498 | 27.9 |
| Renal ca. RXF 393 | 32.8 |
| Renal ca. ACHN | 100.0 |
| Renal ca. UO-31 | 7.9 |
| Renal ca. TK-10 | 20.2 |
| Liver | 0.0 |
| Liver (fetal) | 0.0 |
| Liver ca. (hepatoblast) HepG2 | 0.0 |
| Lung | 0.0 |
| Lung (fetal) | 3.0 |
| Lung ca. (small cell) LX-1 | 1.1 |
| Lung ca. (small cell) NCI-H69 | 0.0 |
| Lung ca. (s. cell var.) SHP-77 | 0.0 |
| Lung ca. (large cell)NCI-H460 | 0.0 |
| Lung ca. (non-sm. cell) A549 | 0.0 |
| Lung ca. (non-s. cell) NCI-H23 | 0.0 |
| Lung ca. (non-s. cell) HOP-62 | 8.7 |
| Lung ca. (non-s. cl) NCI-H522 | 2.9 |
| Lung ca. (squam.) SW 900 | 14.8 |
| Lung ca. (squam.) NCI-H596 | 0.0 |
| Mammary gland | 0.0 |
| Breast ca.* (pl. ef) MCF-7 | 0.0 |
| Breast ca.* (pl. ef) MDA-MB-231 | 0.0 |
| Breast ca.* (pl. ef) T47D | 0.0 |
| Breast ca. BT-549 | 0.0 |
| Breast ca. MDA-N | 0.0 |
| Ovary | 5.8 |
| Ovarian ca. OVCAR-3 | 0.0 |
| Ovarian ca. OVCAR-4 | 0.0 |
| Ovarian ca. OVCAR-5 | 0.0 |
| Ovarian ca. OVCAR-8 | 0.0 |
| Ovarian ca. IGROV-1 | 0.0 |
| Ovarian ca.* (ascites) SK-OV-3 | 3.6 |
| Uterus | 0.0 |
| Placenta | 0.0 |
| Prostate | 3.2 |
| Prostate ca.* (bone met)PC-3 | 0.0 |
| Testis | 0.0 |
| Melanoma Hs688(A).T | 0.0 |
| Melanoma* (met) Hs688(B).T | 0.0 |
| Melanoma UACC-62 | 37.9 |
| Melanoma M14 | 45.1 |
| Melanoma LOX IMVI | 3.7 |
| Melanoma* (met) SK-MEL-5 | 0.0 |
| Adipose | 7.2 |

[0656] TABLE EC
Panel 2D

| | Rel. Exp. (%) |
|---|---|
| | Ag2192, Run |
| Tissue Name | 164024748 |
| Normal Colon | 0.0 |
| CC Well to Mod Diff (ODO3866) | 12.9 |
| CC Margin (ODO3866) | 12.3 |
| CC Gr.2 rectosigmoid (ODO3868) | 0.0 |
| CC Margin (ODO3868) | 0.0 |
| CC Mod Diff (ODO3920) | 0.0 |
| CC Margin (ODO3920) | 0.0 |
| CC Gr.2 ascend colon (ODO3921) | 2.8 |
| CC Margin (ODO3921) | 2.1 |
| CC from Partial Hepatectomy (ODO4309) Mets | 0.0 |
| Liver Margin (ODO4309) | 0.0 |
| Colon mets to lung (OD04451-01) | 0.0 |
| Lung Margin (OD04451-02) | 0.0 |
| Normal Prostate 6546-1 | 0.0 |
| Prostate Cancer (OD04410) | 0.0 |
| Prostate Margin (OD04410) | 0.0 |
| Prostate Cancer (OD04720-01) | 0.0 |
| Prostate Margin (OD04720-02) | 5.0 |
| Normal Lung 061010 | 0.0 |
| Lung Met to Muscle (ODO4286) | 26.4 |
| Muscle Margin (ODO4286) | 0.0 |
| Lung Malignant Cancer (OD03126) | 0.0 |
| Lung Margin (OD03126) | 0.0 |
| Lung Cancer (OD04404) | 0.0 |
| Lung Margin (OD04404) | 0.0 |
| Lung Cancer (OD04565) | 0.0 |
| Lung Margin (OD04565) | 2.9 |
| Lung Cancer (OD04237-01) | 0.0 |
| Lung Margin (OD04237-02) | 0.0 |
| Ocular Mel Met to Liver (ODO4310) | 4.9 |
| Liver Margin (ODO4310) | 0.0 |
| Melanoma Mets to Lung (OD04321) | 2.5 |
| Lung Margin (OD04321) | 0.0 |
| Normal Kidney | 25.0 |
| Kidney Ca, Nuclear grade 2 (OD04338) | 100.0 |
| Kidney Margin (OD04338) | 4.6 |
| Kidney Ca Nuclear grade 1/2 (OD04339) | 48.0 |
| Kidney Margin (OD04339) | 18.9 |
| Kidney Ca, Clear cell type (OD04340) | 26.8 |
| Kidney Margin (OD04340) | 12.0 |
| Kidney Ca, Nuclear grade 3 (OD04348) | 7.0 |
| Kidney Margin (OD04348) | 2.5 |
| Kidney Cancer (OD04622-01) | 2.6 |
| Kidney Margin (OD04622-03) | 5.6 |
| Kidney Cancer (OD04450-01) | 89.5 |
| Kidney Margin (OD04450-03) | 7.2 |
| Kidney Cancer 8120607 | 2.0 |
| Kidney Margin 8120608 | 0.0 |
| Kidney Cancer 8120613 | 0.0 |
| Kidney Margin 8120614 | 7.2 |
| Kidney Cancer 9010320 | 3.9 |
| Kidney Margin 9010321 | 20.6 |
| Normal Uterus | 0.0 |
| Uterus Cancer 064011 | 0.0 |
| Normal Thyroid | 0.0 |
| Thyroid Cancer 064010 | 0.0 |
| Thyroid Cancer A302152 | 1.7 |
| Thyroid Margin A302153 | 2.5 |
| Normal Breast | 0.0 |
| Breast Cancer (OD04566) | 0.0 |
| Breast Cancer (OD04590-01) | 0.0 |
| Breast Cancer Mets (OD04590-03) | 0.0 |
| Breast Cancer Metastasis (OD04655-05) | 0.0 |
| Breast Cancer 064006 | 0.0 |
| Breast Cancer 1024 | 0.0 |
| Breast Cancer 9100266 | 0.0 |
| Breast Margin 9100265 | 0.0 |
| Breast Cancer A209073 | 2.8 |
| Breast Margin A209073 | 0.0 |
| Normal Liver | 0.0 |
| Liver Cancer 064003 | 0.0 |
| Liver Cancer 1025 | 2.0 |
| Liver Cancer 1026 | 0.0 |
| Liver Cancer 6004-T | 5.4 |
| Liver Tissue 6004-N | 3.2 |
| Liver Cancer 6005-T | 0.0 |
| Liver Tissue 6005-N | 0.0 |
| Normal Bladder | 0.0 |
| Bladder Cancer 1023 | 0.0 |
| Bladder Cancer A302173 | 9.2 |
| Bladder Cancer (OD04718-01) | 0.0 |
| Bladder Normal Adjacent (OD04718-03) | 0.0 |
| Normal Ovary | 0.0 |
| Ovarian Cancer 064008 | 0.0 |
| Ovarian Cancer (OD04768-07) | 0.0 |
| Ovary Margin (OD04768-08) | 0.0 |
| Normal Stomach | 0.0 |
| Gastric Cancer 9060358 | 1.1 |
| Stomach Margin 9060359 | 0.0 |
| Gastric Cancer 9060395 | 2.1 |
| Stomach Margin 9060394 | 2.1 |
| Gastric Cancer 9060397 | 0.0 |
| Stomach Margin 9060396 | 0.0 |
| Gastric Cancer 064005 | 0.0 |

[0657] TABLE ED
Panel 3D

| | Rel. Exp. (%) |
|---|---|
| | Ag2192, Run |
| Tissue Name | 164795770 |
| Daoy- Medulloblastoma | 0.0 |
| TE671- Medulloblastoma | 0.0 |
| D283 Med- Medulloblastoma | 0.0 |
| PFSK-1- Primitive Neuroectodermal | 0.0 |
| XF-498- CNS | 64.6 |
| SNB-78- Glioma | 1.8 |
| SF-268- Glioblastoma | 0.0 |
| T98G- Glioblastoma | 0.0 |
| SK-N-SH- Neuroblastoma (metastasis) | 0.0 |
| SF-295- Glioblastoma | 4.0 |
| Cerebellum | 0.0 |
| Cerebellum | 0.0 |
| NCI-H292- Mucoepidermoid lung carcinoma | 0.0 |
| DMS-114- Small cell lung cancer | 0.0 |
| DMS-79- Small cell lung cancer | 0.0 |
| NCI-H146- Small cell lung cancer | 0.0 |
| NCI-H526- Small cell lung cancer | 0.0 |
| NCI-N417- Small cell lung cancer | 0.0 |
| NCI-H82- Small cell lung cancer | 0.0 |
| NCI-H157- Squamous cell lung cancer (metastasis) | 0.0 |
| NCI-H1155- Large cell lung cancer | 0.0 |
| NCI-H1299- Large cell lung cancer | 1.1 |
| NCI-H727- Lung carcinoid | 0.0 |
| NCI-UMC-11- Lung carcinoid | 0.0 |
| LX-1- Small cell lung cancer | 0.0 |
| Colo-205- Colon cancer | 0.0 |
| KM12- Colon cancer | 0.0 |
| KM20L2- Colon cancer | 0.0 |
| NCI-H716- Colon cancer | 0.0 |
| SW-48- Colon adenocarcinoma | 0.0 |
| SW1116- Colon adenocarcinoma | 0.0 |
| LS 174T- Colon adenocarcinoma | 0.0 |
| SW-948- Colon adenocarcinoma | 0.0 |
| SW-480- Colon adenocarcinoma | 0.0 |
| NCI-SNU-5- Gastric carcinoma | 0.0 |
| KATO III- Gastric carcinoma | 0.0 |
| NCI-SNU-16- Gastric carcinoma | 7.5 |
| NCI-SNU-1- Gastric carcinoma | 0.0 |
| RF-1- Gastric adenocarcinoma | 0.0 |
| RF-48- Gastric adenocarcinoma | 0.0 |
| MKN-45- Gastric carcinoma | 0.0 |
| NCI-N87- Gastric carcinoma | 0.0 |
| OVCAR-5- Ovarian carcinoma | 0.0 |
| RL95-2- Uterine carcinoma | 0.0 |
| HelaS3- Cervical adenocarcinoma | 0.0 |
| Ca Ski- Cervical epidermoid | 1.2 |
| carcinoma (metastasis) | |
| ES-2- Ovarian clear cell carcinoma | 6.1 |
| Ramos- Stimulated with PMA/ionomycin 6 h | 0.0 |
| Ramos- Stimulated with PMA/ionomycin 14 h | 0.0 |
| MEG-01- Chronic myelogenous | 0.0 |
| leukemia (megokaryoblast) | |
| Raji- Burkitt's lymphoma | 4.4 |
| Daudi- Burkitt's lymphoma | 0.0 |
| U266- B-cell plasmacytoma | 0.0 |
| CA46- Burkitt's lymphoma | 0.0 |
| RL- non-Hodgkin's B-cell lymphoma | 0.0 |
| JM1- pre-B-cell lymphoma | 0.0 |
| Jurkat- T cell leukemia | 0.0 |
| TF-1- Erythroleukemia | 0.0 |
| HUT 78- T-cell lymphoma | 0.0 |
| U937- Histiocytic lymphoma | 0.0 |
| KU-812- Myelogenous leukemia | 0.0 |
| 769-P- Clear cell renal carcinoma | 44.1 |
| Caki-2- Clear cell renal carcinoma | 100.0 |
| SW 839- Clear cell renal carcinoma | 22.1 |
| Rhabdoid kidney tumor | 0.0 |
| Hs766T- Pancreatic carcinoma (LN metastasis) | 0.0 |
| CAPAN-1- Pancreatic adenocarcinoma | 0.0 |
| (liver metastasis) | |
| SU86.86- Pancreatic carcinoma (liver metastasis) | 0.0 |
| BxPC-3- Pancreatic adenocarcinoma | 0.0 |
| HPAC- Pancreatic adenocarcinoma | 0.0 |
| MIA PaCa-2- Pancreatic carcinoma | 0.0 |
| CFPAC-1- Pancreatic ductal adenocarcinoma | 0.0 |
| PANC-1- Pancreatic epithelioid ductal carcinoma | 0.0 |
| T24- Bladder carcinma (transitional cell) | 2.0 |
| 5637- Bladder carcinoma | 0.0 |
| HT-1197- Bladder carcinoma | 0.0 |
| UM-UC-3- Bladder carcinma (transitional cell) | 0.0 |
| A204- Rhabdomyosarcoma | 0.0 |
| HT-1080- Fibrosarcoma | 29.1 |
| MG-63- Osteosarcoma | 0.0 |
| SK-LMS-1- Leiomyosarcoma (vulva) | 23.7 |
| SJRH30- Rhabdomyosarcoma (met to bone marrow) | 2.2 |
| A431- Epidermoid carcinoma | 0.0 |
| WM266-4- Melanoma | 22.5 |
| DU 145- Prostate carcinoma (brain metastasis) | 0.0 |
| MDA-MB-468- Breast adenocarcinoma | 0.0 |
| SCC-4- Squamous cell carcinoma of tongue | 0.0 |
| SCC-9- Squamous cell carcinoma of tongue | 0.0 |
| SCC-15- Squamous cell carcinoma of tongue | 0.0 |
| CAL 27- Squamous cell carcinoma of tongue | 0.0 |

[0658] TABLE EE
Panel 4D

| | Rel. Exp. (%) |
|---|---|
| | Ag2192, Run |
| Tissue Name | 163588121 |
| Secondary Th1 act | 0.0 |
| Secondary Th2 act | 0.0 |
| Secondary Tr1 act | 12.3 |
| Secondary Th1 rest | 0.0 |
| Secondary Th2 rest | 0.0 |
| Secondary Tr1 rest | 0.0 |
| Primary Th1 act | 0.0 |
| Primary Th2 act | 0.0 |
| Primary Tr1 act | 0.0 |
| Primary Th1 rest | 0.0 |
| Primary Th2 rest | 0.0 |
| Primary Tr1 rest | 0.0 |
| CD45RA CD4 lymphocyte act | 0.0 |
| CD45RO CD4 lymphocyte act | 0.0 |
| CD8 lymphocyte act | 0.0 |
| Secondary CD8 lymphocyte rest | 0.0 |
| Secondary CD8 lymphocyte act | 0.0 |
| CD4 lymphocyte none | 0.0 |
| 2ry Th1/Th2/Tr1_anti-CD95 CH11 | 0.0 |
| LAK cells rest | 0.0 |
| LAK cells IL-2 | 0.0 |
| LAK cells IL-2 + IL-12 | 0.0 |
| LAK cells IL-2 + IFN gamma | 0.0 |
| LAK cells IL-2 + IL-18 | 0.0 |
| LAK cells PMA/ionomycin | 0.0 |
| NK Cells IL-2 rest | 0.0 |
| Two Way MLR 3 day | 0.0 |
| Two Way MLR 5 day | 0.0 |
| Two Way MLR 7 day | 0.0 |
| PBMC rest | 0.0 |
| PBMC PWM | 0.0 |
| PBMC PHA-L | 20.0 |
| Ramos (B cell) none | 0.0 |
| Ramos (B cell) ionomycin | 0.0 |
| B lymphocytes PWM | 20.9 |
| B lymphocytes CD40L and IL-4 | 0.0 |
| EOL-1 dbcAMP | 0.0 |
| EOL-1 dbcAMP PMA/ionomycin | 0.0 |
| Dendritic cells none | 0.0 |
| Dendritic cells LPS | 0.0 |
| Dendritic cells anti-CD40 | 0.0 |
| Monocytes rest | 0.0 |
| Monocytes LPS | 0.0 |
| Macrophages rest | 0.0 |
| Macrophages LPS | 0.0 |
| HUVEC none | 0.0 |
| HUVEC starved | 0.0 |
| HUVEC IL-1beta | 0.0 |
| HUVEC IFN gamma | 0.0 |
| HUVEC TNF alpha + IFN gamma | 0.0 |
| HUVEC TNF alpha + IL4 | 0.0 |
| HUVEC IL-11 | 0.0 |
| Lung Microvascular EC none | 0.0 |
| Lung Microvascular EC TNFalpha + IL-1beta | 24.3 |
| Microvascular Dermal EC none | 0.0 |
| Microsvasular Dermal EC TNFalpha + IL-1beta | 0.0 |
| Bronchial epithelium TNFalpha + IL1beta | 0.0 |
| Small airway epithelium none | 0.0 |
| Small airway epithelium TNFalpha + IL-1beta | 0.0 |
| Coronery artery SMC rest | 0.0 |
| Coronery artery SMC TNFalpha + IL-1beta | 0.0 |
| Astrocytes rest | 0.0 |
| Astrocytes TNFalpha + IL-1beta | 0.0 |
| KU-812 (Basophil) rest | 0.0 |
| KU-812 (Basophil) PMA/ionomycin | 0.0 |
| CCD1106 (Keratinocytes) none | 0.0 |
| CCD1106 (Keratinocytes) TNFalpha + IL-1beta | 0.0 |
| Liver cirrhosis | 38.7 |
| Lupus kidney | 16.7 |
| NCI-H292 none | 0.0 |
| NCI-H292 IL-4 | 0.0 |
| NCI-H292 IL-9 | 0.0 |
| NCI-H292 IL-13 | 0.0 |
| NCI-H292 IFN gamma | 0.0 |
| HPAEC none | 0.0 |
| HPAEC TNF alpha + IL-1 beta | 0.0 |
| Lung fibroblast none | 67.8 |
| Lung fibroblast TNF alpha + IL-1 beta | 0.0 |
| Lung fibroblast IL-4 | 76.3 |
| Lung fibroblast IL-9 | 65.1 |
| Lung fibroblast IL-13 | 66.0 |
| Lung fibroblast IFN gamma | 0.0 |
| Dermal fibroblast CCD1070 rest | 0.0 |
| Dermal fibroblast CCD1070 TNF alpha | 22.2 |
| Dermal fibroblast CCD1070 IL-1 beta | 19.9 |
| Dermal fibroblast IFN gamma | 0.0 |
| Dermal fibroblast IL-4 | 0.0 |
| IBD Colitis 2 | 18.2 |
| IBD Crohn's | 0.0 |
| Colon | 40.6 |
| Lung | 0.0 |
| Thymus | 100.0 |
| Kidney | 0.0 |

[0659] AI_comprehensive panel_v1.0 Summary: Ag2192 Expression of this gene is low/undetectable (CTs>35) across all of the samples on this panel.

[0660] Panel 1.3D Summary: Ag2192 The expression of the CG155882-01 gene is highest in a sample derived from a renal cancer cell line (ACHN)(CT=33.3). In addition, there is expression in another renal cancer cell line, two melanoma cell lines and a glioma cell line. Thus the expression of this gene could be used to distinguish these samples from others in the panel. Moreover, targeting with a human monoclonal antibody of CG155882-01 that results in an inhibition of the signaling of this receptor will have therapeutic effect on these tumors, preferably on renal cell carcinoma and will result in reduced cell growth and proliferation

[0661] Panel 2D Summary: Ag2192 The expression of the CG155882-01 gene appears to be highest in a sample derived from a kidney cancer(CT=33.3). In addition, there appears to be substantial expression in several other kidney cancer samples. This result is in corcodance with the result seen in Panel 1.3D. Of note is the difference in expression between kidney cancer samples and their respective normal adjacent tissues. Thus, the expression of this gene could be used to distinguish kidney cancer samples from the rest of the samples in the panel. In addition, this data indicate that this GPCR has a role in Renal cell carcinoma progression, likely in cell growth and proliferation as it has been previous shown for other member of this family. Thus, therapeutic modulation of this gene, through the use of small molecule drugs, antibodies or protein therapeutics might be of benefit in the treatment of kidney cancer, preferably renal cell carcinoma.

[0662] Panel 3D Summary: Ag2192 The expression of the CG155882-01 gene appears to be highest in samples derived from kidney cancer cell lines (CT-32.6). This association with kidney cancer is also seen in Panels 1.3D and 2D. In addition, there is substantial expression seen in one brain cancer cell line, one fibrosarcoma cell line, one melanoma cell line and one leiomyosarcoma cell line. Thus, the expression of this gene could be used to distingish these samples from other samples in the panel. Moreover, therapeutic modulation of this gene, through the use of small molecule drugs, antibodies or protein therapeutics might be of benefit in the treatment of kidney cancer, melanoma, fiborsarcoma, brain cancer, or leiomyosarcoma.

[0663] Panel 4D Summary: Ag 2192 The expression of the CG155882-01 gene is higher in untreated fibroblasts than in fibroblasts treated by the potent inflammatory cytokines TNF-a and IFN-g cytokines but not by IL-4 cytokine. IL-4 has been associated with anti-inflammatory properties. TNF-a and IFNg have been shown to lead to the activation of proteolytic degradation of extracellular matrix in fibroblasts, a phenomenon associated with emphysema. IFN g has also been shown to lead to direct granulomatous inflammation of the lung. Therefore, therapeutic modulation of this gene product, through the use of small molecule drugs, or antibodies might be beneficial for the treatment of these diseases.

[0664] F. CG167853-01: CYTOPLASMIC ACETYL-COA HYDROLASE.

[0665] Expression of gene CG167853-01 was assessed using the primer-probe set Ag6104, described in Table FA. Results of the RTQ-PCR runs are shown in Tables FB and FC.

TABLE FA
Probe Name Ag6104

| | | | Start | SEQ |
|---|---|---|---|---|
| Primers | Sequences | Length | Position | ID No |
| Forward | 5′-acagtacatcagaagtgaaatcatatgt-3′ | 28 | 1509 | 148 |
| Probe | TET-5′-ccatgctattgacagcaattcatgca-3′-TAMRA | 26 | 1551 | 149 |
| Reverse | 5′-gctagcagacatatggttaaagtaagatac-3′ | 30 | 1579 | 150 |

[0666] TABLE FB
General_screening_panel_v1.5

| | Rel. Exp. (%) |
|---|---|
| | Ag6104, Run |
| Tissue Name | 248491002 |
| Adipose | 0.0 |
| Melanoma* Hs688(A).T | 0.0 |
| Melanoma* Hs688(B).T | 0.0 |
| Melanoma* M14 | 0.0 |
| Melanoma* LOXIMVI | 0.0 |
| Melanoma* SK-MEL-5 | 48.6 |
| Squamous cell carcinoma SCC-4 | 0.0 |
| Testis Pool | 1.5 |
| Prostate ca.* (bone met) PC-3 | 1.4 |
| Prostate Pool | 0.0 |
| Placenta | 0.0 |
| Uterus Pool | 0.0 |
| Ovarian ca. OVCAR-3 | 0.0 |
| Ovarian ca. SK-OV-3 | 0.0 |
| Ovarian ca. OVCAR-4 | 0.0 |
| Ovarian ca. OVCAR-5 | 0.0 |
| Ovarian ca. IGROV-1 | 0.5 |
| Ovarian ca. OVCAR-8 | 0.0 |
| Ovary | 0.0 |
| Breast ca. MCF-7 | 0.4 |
| Breast ca. MDA-MB-231 | 0.4 |
| Breast ca. BT 549 | 0.0 |
| Breast ca. T47D | 0.0 |
| Breast ca. MDA-N | 0.0 |
| Breast Pool | 0.3 |
| Trachea | 0.0 |
| Lung | 0.0 |
| Fetal Lung | 0.8 |
| Lung ca. NCI-N417 | 0.0 |
| Lung ca. LX-1 | 0.0 |
| Lung ca. NCI-H146 | 0.0 |
| Lung ca. SHP-77 | 0.0 |
| Lung ca. A549 | 0.0 |
| Lung ca. NCI-H526 | 0.0 |
| Lung ca. NCI-H23 | 0.6 |
| Lung ca. NCI-H460 | 0.0 |
| Lung ca. HOP-62 | 0.5 |
| Lung ca. NCI-H522 | 0.7 |
| Liver | 5.6 |
| Fetal Liver | 100.0 |
| Liver ca. HepG2 | 0.0 |
| Kidney Pool | 0.3 |
| Fetal Kidney | 2.1 |
| Renal ca. 786-0 | 0.0 |
| Renal ca. A498 | 0.0 |
| Renal ca. ACHN | 0.0 |
| Renal ca. UO-31 | 0.3 |
| Renal ca. TK-10 | 0.0 |
| Bladder | 0.3 |
| Gastric ca. (liver met.) NCI-N87 | 0.0 |
| Gastric ca. KATO III | 0.0 |
| Colon ca. SW-948 | 0.0 |
| Colon ca. SW480 | 0.0 |
| Colon ca.* (SW480 met) SW620 | 0.0 |
| Colon ca. HT29 | 0.0 |
| Colon ca. HCT-116 | 0.0 |
| Colon ca. CaCo-2 | 7.9 |
| Colon cancer tissue | 0.0 |
| Colon ca. SW1116 | 0.0 |
| Colon ca. Colo-205 | 0.0 |
| Colon ca. SW-48 | 0.0 |
| Colon Pool | 0.0 |
| Small Intestine Pool | 0.3 |
| Stomach Pool | 0.0 |
| Bone Marrow Pool | 0.1 |
| Fetal Heart | 0.0 |
| Heart Pool | 0.0 |
| Lymph Node Pool | 0.0 |
| Fetal Skeletal Muscle | 0.0 |
| Skeletal Muscle Pool | 0.0 |
| Spleen Pool | 0.3 |
| Thymus Pool | 0.7 |
| CNS cancer (glio/astro) U87-MG | 0.0 |
| CNS cancer (glio/astro) U-118-MG | 0.6 |
| CNS cancer (neuro; met) SK-N-AS | 0.6 |
| CNS cancer (astro) SF-539 | 0.0 |
| CNS cancer (astro) SNB-75 | 0.1 |
| CNS cancer (glio) SNB-19 | 0.6 |
| CNS cancer (glio) SF-295 | 3.6 |
| Brain (Amygdala) Pool | 0.1 |
| Brain (cerebellum) | 0.3 |
| Brain (fetal) | 2.8 |
| Brain (Hippocampus) Pool | 0.8 |
| Cerebral Cortex Pool | 0.5 |
| Brain (Substantia nigra) Pool | 0.0 |
| Brain (Thalamus) Pool | 0.4 |
| Brain (whole) | 0.5 |
| Spinal Cord Pool | 10.5 |
| Adrenal Gland | 0.0 |
| Pituitary gland Pool | 0.0 |
| Salivary Gland | 0.0 |
| Thyroid (female) | 0.0 |
| Pancreatic ca. CAPAN2 | 0.0 |
| Pancreas Pool | 0.0 |

[0667] TABLE FC
Panel 4.1D

| | Rel. Exp. (%) |
|---|---|
| | Ag6104, Run |
| Tissue Name | 248523701 |
| Secondary Th1 act | 0.0 |
| Secondary Th2 act | 7.9 |
| Secondary Tr1 act | 0.0 |
| Secondary Th1 rest | 0.0 |
| Secondary Th2 rest | 0.0 |
| Secondary Tr1 rest | 0.0 |
| Primary Th1 act | 0.0 |
| Primary Th2 act | 0.0 |
| Primary Tr1 act | 0.0 |
| Primary Th1 rest | 0.0 |
| Primary Th2 rest | 0.0 |
| Primary Tr1 rest | 0.0 |
| CD45RA CD4 lymphocyte act | 0.0 |
| CD45RO CD4 lymphocyte act | 0.0 |
| CD8 lymphocyte act | 0.0 |
| Secondary CD8 lymphocyte rest | 0.0 |
| Secondary CD8 lymphocyte act | 0.0 |
| CD4 lymphocyte none | 2.9 |
| 2ry Th1/Th2/Tr1_anti-CD95 CH11 | 0.0 |
| LAK cells rest | 0.0 |
| LAK cells IL-2 | 0.0 |
| LAK cells IL-2 + IL-12 | 0.0 |
| LAK cells IL-2 + IFN gamma | 0.0 |
| LAK cells IL-2 + IL-18 | 0.0 |
| LAK cells PMA/ionomycin | 0.0 |
| NK Cells IL-2 rest | 0.0 |
| Two Way MLR 3 day | 0.0 |
| Two Way MLR 5 day | 0.0 |
| Two Way MLR 7 day | 0.0 |
| PBMC rest | 0.0 |
| PBMC PWM | 0.0 |
| PBMC PHA-L | 0.0 |
| Ramos (B cell) none | 0.0 |
| Ramos (B cell) ionomycin | 0.0 |
| B lymphocytes PWM | 0.0 |
| B lymphocytes CD40L and IL-4 | 0.0 |
| EOL-1 dbcAMP | 0.0 |
| EOL-1 dbcAMP PMA/ionomycin | 0.0 |
| Dendritic cells none | 0.0 |
| Dendritic cells LPS | 0.0 |
| Dendritic cells anti-CD40 | 0.0 |
| Monocytes rest | 0.0 |
| Monocytes LPS | 0.0 |
| Macrophages rest | 0.0 |
| Macrophages LPS | 0.0 |
| HUVEC none | 0.0 |
| HUVEC starved | 0.0 |
| HUVEC IL-1beta | 0.0 |
| HUVEC IFN gamma | 0.0 |
| HUVEC TNF alpha + IFN gamma | 0.0 |
| HUVEC TNF alpha + IL4 | 0.0 |
| HUVEC IL-11 | 0.0 |
| Lung Microvascular EC none | 0.0 |
| Lung Microvascular EC TNFalpha + IL-1beta | 0.0 |
| Microvascular Dermal EC none | 0.0 |
| Microsvasular Dermal EC TNFalpha + IL-1beta | 0.0 |
| Bronchial epithelium TNFalpha + IL1beta | 0.0 |
| Small airway epithelium none | 0.0 |
| Small airway epithelium TNFalpha + IL-1beta | 0.0 |
| Coronery artery SMC rest | 0.0 |
| Coronery artery SMC TNFalpha + IL-1beta | 0.0 |
| Astrocytes rest | 0.0 |
| Astrocytes TNFalpha + IL-1beta | 0.0 |
| KU-812 (Basophil) rest | 0.0 |
| KU-812 (Basophil) PMA/ionomycin | 3.5 |
| CCD1106 (Keratinocytes) none | 0.0 |
| CCD1106 (Keratinocytes) TNFalpha + IL-1beta | 0.0 |
| Liver cirrhosis | 23.5 |
| NCI-H292 none | 0.0 |
| NCI-H292 IL-4 | 0.0 |
| NCI-H292 IL-9 | 2.7 |
| NCI-H292 IL-13 | 0.0 |
| NCI-H292 IFN gamma | 0.0 |
| HPAEC none | 0.0 |
| HPAEC TNF alpha + IL-1 beta | 0.0 |
| Lung fibroblast none | 33.2 |
| Lung fibroblast TNF alpha + IL-1 beta | 0.0 |
| Lung fibroblast IL-4 | 16.3 |
| Lung fibroblast IL-9 | 20.3 |
| Lung fibroblast IL-13 | 0.0 |
| Lung fibroblast IFN gamma | 7.0 |
| Dermal fibroblast CCD1070 rest | 0.0 |
| Dermal fibroblast CCD1070 TNF alpha | 0.0 |
| Dermal fibroblast CCD1070 IL-1 beta | 0.0 |
| Dermal fibroblast IFN gamma | 0.0 |
| Dermal fibroblast IL-4 | 4.8 |
| Dermal Fibroblasts rest | 0.0 |
| Neutrophils TNFa + LPS | 0.0 |
| Neutrophils rest | 0.0 |
| Colon | 3.0 |
| Lung | 0.0 |
| Thymus | 5.3 |
| Kidney | 100.0 |

[0668] CNS_neurodegeneration_v1.0 Summary: Ag6104 Expression of this gene is low/undetectable (CTs>35) across all of the samples on this panel.

[0669] General_screening_panel_v1.5 Summary: Ag6104 Highest expression of this gene is seen mainly in fetal liver (CT=29.9). Low expression of this gene is also seen in adult liver. Interestingly, this gene is expressed at much higher levels in fetal (CT=29.9) when compared to adult liver (CT=34.1). This observation suggests that expression of this gene can be used to distinguish fetal from adult liver. In addition, the relative overexpression of this gene in fetal tissue suggests that the protein product may enhance liver growth or development in the fetus and thus may also act in a regenerative capacity in the adult. Therefore, therapeutic modulation of the protein encoded by this gene could be useful in treatment of liver related diseases.

[0670] Moderate to low expression of this gene is also seen in a few cell lines derived from melanoma, colon and brain cancer. Therefore, therapeutic modulation of this gene may be useful in the treatment of melanoma, colon and brain cancers.

[0671] Panel 4.1D Summary: Ag6104 Low expression of this gene is seen mainly in kidney (CT=33.4). Therefore, antibody or small molecule therapies designed with the protein encoded for by this gene could modulate kidney function and be important in the treatment of inflammatory or autoimmune diseases that affect the kidney, including lupus and glomerulonephritis.

[0672] Panel 5 Islet Summary: Ag6104 Expression of this gene is low/undetectable (CTs>35) across all of the samples on this panel due to a probable probe or chemistry failure.

[0673] G. CG167873-01: P2X Purinoceptor 5.

[0674] Expression of gene CG167873-01 was assessed using the primer-probe set Ag6266, described in Table GA. Results of the RTQ-PCR runs are shown in Tables GB and GC.

TABLE GA
Probe Name Ag6266

| | | | Start | SEQ |
|---|---|---|---|---|
| Primers | Sequences | Length | Position | ID No |
| Forward | 5′-gaagacttcaccattttcataaagaac-3′ | 27 | 571 | 151 |
| Probe | TET-5′-ttcaacttctccaaccgtctggacaa-3′-TAMRA | 26 | 616 | 152 |
| Reverse | 5′-cggagqagacagagtttgaaa-3′ | 21 | 647 | 153 |

[0675] TABLE GB
General_screening_panel_v1.5

| | Rel. Exp. (%) |
|---|---|
| | Ag6266, Run |
| Tissue Name | 258845656 |
| Adipose | 6.5 |
| Melanoma* Hs688(A).T | 6.7 |
| Melanoma* Hs688(B).T | 0.0 |
| Melanoma* M14 | 4.9 |
| Melanoma* LOXIMVI | 0.0 |
| Melanoma* SK-MEL-5 | 0.0 |
| Squamous cell carcinoma SCC-4 | 0.0 |
| Testis Pool | 0.0 |
| Prostate ca.* (bone met) PC-3 | 0.0 |
| Prostate Pool | 0.0 |
| Placenta | 0.0 |
| Uterus Pool | 0.0 |
| Ovarian ca. OVCAR-3 | 0.0 |
| Ovarian ca. SK-OV-3 | 0.0 |
| Ovarian ca. OVCAR-4 | 7.7 |
| Ovarian ca. OVCAR-5 | 15.5 |
| Ovarian ca. IGROV-1 | 0.0 |
| Ovarian ca. OVCAR-8 | 0.0 |
| Ovary | 0.0 |
| Breast ca. MCF-7 | 2.0 |
| Breast ca. MDA-MB-231 | 0.0 |
| Breast ca. BT 549 | 20.2 |
| Breast ca. T47D | 0.0 |
| Breast ca. MDA-N | 5.6 |
| Breast Pool | 0.0 |
| Trachea | 1.6 |
| Lung | 0.0 |
| Fetal Lung | 0.0 |
| Lung ca. NCI-N417 | 0.0 |
| Lung ca. LX-1 | 2.8 |
| Lung ca. NCI-H146 | 15.5 |
| Lung ca. SHP-77 | 0.0 |
| Lung ca. A549 | 6.9 |
| Lung ca. NCI-H526 | 0.0 |
| Lung ca. NCI-H23 | 19.1 |
| Lung ca. NCI-H460 | 5.0 |
| Lung ca. HOP-62 | 7.3 |
| Lung ca. NCI-H522 | 14.7 |
| Liver | 0.0 |
| Fetal Liver | 0.0 |
| Liver ca. HepG2 | 1.8 |
| Kidney Pool | 0.0 |
| Fetal Kidney | 0.0 |
| Renal ca. 786-0 | 0.0 |
| Renal ca. A498 | 3.8 |
| Renal ca. ACHN | 24.5 |
| Renal ca. UO-31 | 100.0 |
| Renal ca. TK-10 | 3.3 |
| Bladder | 3.2 |
| Gastric ca. (liver met.) NCI-N87 | 0.0 |
| Gastric ca. KATO III | 0.0 |
| Colon ca. SW-948 | 0.0 |
| Colon ca. SW480 | 34.4 |
| Colon ca.* (SW480 met) SW620 | 43.5 |
| Colon ca. HT29 | 0.0 |
| Colon ca. HCT-116 | 0.0 |
| Colon ca. CaCo-2 | 0.0 |
| Colon cancer tissue | 0.0 |
| Colon ca. SW1116 | 0.0 |
| Colon ca. Colo-205 | 0.0 |
| Colon ca. SW-48 | 0.0 |
| Colon Pool | 0.0 |
| Small Intestine Pool | 2.6 |
| Stomach Pool | 0.0 |
| Bone Marrow Pool | 0.0 |
| Fetal Heart | 0.0 |
| Heart Pool | 0.0 |
| Lymph Node Pool | 0.0 |
| Fetal Skeletal Muscle | 7.2 |
| Skeletal Muscle Pool | 17.4 |
| Spleen Pool | 1.9 |
| Thymus Pool | 2.7 |
| CNS cancer (glio/astro) U87-MG | 0.0 |
| CNS cancer (glio/astro) U-118-MG | 5.8 |
| CNS cancer (neuro; met) SK-N-AS | 0.0 |
| CNS cancer (astro) SF-539 | 0.0 |
| CNS cancer (astro) SNB-75 | 6.1 |
| CNS cancer (glio) SNB-19 | 0.0 |
| CNS cancer (glio) SF-295 | 2.9 |
| Brain (Amygdala) Pool | 0.0 |
| Brain (cerebellum) | 12.5 |
| Brain (fetal) | 4.2 |
| Brain (Hippocampus) Pool | 0.0 |
| Cerebral Cortex Pool | 0.0 |
| Brain (Substantia nigra) Pool | 0.0 |
| Brain (Thalamus) Pool | 0.0 |
| Brain (whole) | 26.4 |
| Spinal Cord Pool | 74.7 |
| Adrenal Gland | 2.8 |
| Pituitary gland Pool | 0.0 |
| Salivary Gland | 0.0 |
| Thyroid (female) | 0.0 |
| Pancreatic ca. CAPAN2 | 0.0 |
| Pancreas Pool | 0.0 |

[0676] TABLE GC
Panel 4.1D

| | Rel. Exp. (%) |
|---|---|
| | Ag6266, Run |
| Tissue Name | 258923092 |
| Secondary Th1 act | 100.0 |
| Secondary Th2 act | 31.6 |
| Secondary Tr1 act | 1.6 |
| Secondary Th1 rest | 3.2 |
| Secondary Th2 rest | 2.1 |
| Secondary Tr1 rest | 0.0 |
| Primary Th1 act | 6.9 |
| Primary Th2 act | 12.2 |
| Primary Tr1 act | 19.8 |
| Primary Th1 rest | 0.0 |
| Primary Th2 rest | 0.0 |
| Primary Tr1 rest | 1.9 |
| CD45RA CD4 lymphocyte act | 21.3 |
| CD45RO CD4 lymphocyte act | 34.6 |
| CD8 lymphocyte act | 0.0 |
| Secondary CD8 lymphocyte rest | 8.7 |
| Secondary CD8 lymphocyte act | 0.0 |
| CD4 lymphocyte none | 0.0 |
| 2ry Th1/Th2/Tr1_anti-CD95 CH11 | 8.2 |
| LAK cells rest | 0.0 |
| LAK cells IL-2 | 0.0 |
| LAK cells IL-2 + IL-12 | 5.2 |
| LAK cells IL-2 + IFN gamma | 0.0 |
| LAK cells IL-2 + IL-18 | 2.3 |
| LAK cells PMA/ionomycin | 0.0 |
| NK Cells IL-2 rest | 6.3 |
| Two Way MLR 3 day | 5.3 |
| Two Way MLR 5 day | 1.9 |
| Two Way MLR 7 day | 13.5 |
| PBMC rest | 0.0 |
| PBMC PWM | 2.7 |
| PBMC PHA-L | 3.0 |
| Ramos (B cell) none | 7.1 |
| Ramos (B cell) ionomycin | 6.0 |
| B lymphocytes PWM | 0.6 |
| B lymphocytes CD40L and IL-4 | 14.7 |
| EOL-1 dbcAMP | 2.2 |
| EOL-1 dbcAMP PMA/ionomycin | 0.0 |
| Dendritic cells none | 0.0 |
| Dendritic cells LPS | 0.0 |
| Dendritic cells anti-CD40 | 0.0 |
| Monocytes rest | 0.7 |
| Monocytes LPS | 0.0 |
| Macrophages rest | 0.0 |
| Macrophages LPS | 0.0 |
| HUVEC none | 0.0 |
| HUVEC starved | 0.0 |
| HUVEC IL-1beta | 0.0 |
| HUVEC IFN gamma | 0.0 |
| HUVEC TNF alpha + IFN gamma | 0.0 |
| HUVEC TNF alpha + IL4 | 0.0 |
| HUVEC IL-11 | 0.0 |
| Lung Microvascular EC none | 0.0 |
| Lung Microvascular EC TNFalpha + IL-1beta | 0.0 |
| Microvascular Dermal EC none | 0.0 |
| Microsvasular Dermal EC TNFalpha + IL-1beta | 0.0 |
| Bronchial epithelium TNFalpha + IL1beta | 0.0 |
| Small airway epithelium none | 0.0 |
| Small airway epithelium TNFalpha + IL-1beta | 0.0 |
| Coronery artery SMC rest | 0.0 |
| Coronery artery SMC TNFalpha + IL-1beta | 0.0 |
| Astrocytes rest | 0.0 |
| Astrocytes TNFalpha + IL-1beta | 0.0 |
| KU-812 (Basophil) rest | 5.1 |
| KU-812 (Basophil) PMA/ionomycin | 9.0 |
| CCD1106 (Keratinocytes) none | 1.9 |
| CCD1106 (Keratinocytes) TNFalpha + IL-1beta | 0.0 |
| Liver cirrhosis | 0.0 |
| NCI-H292 none | 6.0 |
| NCI-H292 IL-4 | 2.7 |
| NCI-H292 IL-9 | 0.6 |
| NCI-H292 IL-13 | 1.5 |
| NCI-H292 IFN gamma | 0.0 |
| HPAEC none | 0.0 |
| HPAEC TNF alpha + IL-1 beta | 0.0 |
| Lung fibroblast none | 0.0 |
| Lung fibroblast TNF alpha + IL-1 beta | 0.0 |
| Lung fibroblast IL-4 | 0.0 |
| Lung fibroblast IL-9 | 0.0 |
| Lung fibroblast IL-13 | 0.0 |
| Lung fibroblast IFN gamma | 0.0 |
| Dermal fibroblast CCD1070 rest | 2.7 |
| Dermal fibroblast CCD1070 TNF alpha | 0.0 |
| Dermal fibroblast CCD1070 IL-1 beta | 0.0 |
| Dermal fibroblast IFN gamma | 0.0 |
| Dermal fibroblast IL-4 | 0.0 |
| Dermal Fibroblasts rest | 0.0 |
| Neutrophils TNFa + LPS | 0.0 |
| Neutrophils rest | 0.0 |
| Colon | 0.0 |
| Lung | 0.0 |
| Thymus | 0.0 |
| Kidney | 0.0 |

[0677] CNS_neurodegeneration_v1.0 Summary: Ag6266 Expression of this gene is low/undetectable (CTs>35) across all of the samples on this panel.

[0678] General_screening_panel_v1.5 Summary: Ag6266 Low expression of this gene is mainly detected in a renal cancer UO-31 cell line (CT=33.9). Therefore, expression of this gene may be used as a diagnostic marker for renal cancer. Furthermore, therapeutic modulation of this gene or its protein product through the use of small molecule drug may be used to treat renal cancer.

[0679] Low expression of this gene is also seen in spinal cord sample. Therefore, therapeutic modulation of this gene or its protein product may be useful in the treatment of neurological disorders that affect spinal cord.

[0680] Panel 4.1D Summary: Ag6266 Highest expression of this gene is detected in activated secondary Th1 cells (CT=31.9). In addition, low expression of this gene is also in activated primary Tr1, Th2 and activated secondary Th2, naive T cells, and memory T cells. The expression pattern of this gene in T cells suggests that it may therefore be important in T cell polarization. Thus, therapeutic regulation of the transcript or the protein encoded by the transcript could be important in immune modulation and in the treatment of T cell-mediated diseases such as asthma, arthritis, psoriasis, IBD including Crohns disease and ulcerativ colitis, and lupus.

[0681] H. CG167873-02: P2X Purinoceptor 5.

[0682] Expression of gene CG167873-02 was assessed using the primer-probe set Ag6267, described in Table HA. Results of the RTQ-PCR runs are shown in Tables HB and HC.

TABLE HA
Probe Name Ag6267

| | | | Start | SEQ |
|---|---|---|---|---|
| Primers | Seqnences | Length | Position | ID No |
| Forward | 5′-atgggtgctggtgctttc-3′ | 18 | 938 | 154 |
| Probe | TET-5′-tctgcgacctggtactcatctacctca-3′-TAMRA | 27 | 957 | 155 |
| Reverse | 5′-gtacttcttgtcacggtaaaactctct-3′ | 27 | 992 | 156 |

[0683] TABLE HB
General_screening_panel_v1.5

| | Rel. Exp. (%) |
|---|---|
| | Ag6267, Run |
| Tissue Name | 258845657 |
| Adipose | 0.0 |
| Melanoma* Hs688(A).T | 0.0 |
| Melanoma* Hs688(B).T | 0.0 |
| Melanoma* M14 | 0.0 |
| Melanoma* LOXIMVI | 0.0 |
| Melanoma* SK-MEL-5 | 0.0 |
| Squamous cell carcinoma SCC-4 | 0.0 |
| Testis Pool | 0.0 |
| Prostate ca.* (bone met) PC-3 | 0.0 |
| Prostate Pool | 0.0 |
| Placenta | 0.0 |
| Uterus Pool | 0.0 |
| Ovarian ca. OVCAR-3 | 0.0 |
| Ovarian ca. SK-OV-3 | 0.0 |
| Ovarian ca. OVCAR-4 | 0.0 |
| Ovarian ca. OVCAR-5 | 0.0 |
| Ovarian ca. IGROV-1 | 0.0 |
| Ovarian ca. OVCAR-8 | 0.0 |
| Ovary | 0.0 |
| Breast ca. MCF-7 | 0.0 |
| Breast ca. MDA-MB-231 | 0.0 |
| Breast ca. BT 549 | 0.0 |
| Breast ca. T47D | 0.0 |
| Breast ca. MDA-N | 0.0 |
| Breast Pool | 0.0 |
| Trachea | 0.0 |
| Lung | 0.0 |
| Fetal Lung | 0.0 |
| Lung ca. NCI-N417 | 0.0 |
| Lung ca. LX-1 | 0.1 |
| Lung ca. NCI-H146 | 0.0 |
| Lung ca. SHP-77 | 0.0 |
| Lung ca. A549 | 0.0 |
| Lung ca. NCI-H526 | 0.0 |
| Lung ca. NCI-H23 | 100.0 |
| Lung ca. NCI-H460 | 0.2 |
| Lung ca. HOP-62 | 0.0 |
| Lung ca. NCI-H522 | 0.0 |
| Liver | 0.0 |
| Fetal Liver | 3.3 |
| Liver ca. HepG2 | 0.0 |
| Kidney Pool | 0.0 |
| Fetal Kidney | 0.0 |
| Renal ca. 786-0 | 0.0 |
| Renal ca. A498 | 0.0 |
| Renal ca. ACHN | 0.0 |
| Renal ca. UO-31 | 0.0 |
| Renal ca. TK-10 | 0.0 |
| Bladder | 0.0 |
| Gastric ca. (liver met.) NCI-N87 | 0.0 |
| Gastric ca. KATO III | 0.0 |
| Colon ca. SW-948 | 0.0 |
| Colon ca. SW480 | 0.2 |
| Colon ca.* (SW480 met) SW620 | 0.1 |
| Colon ca. HT29 | 0.0 |
| Colon ca. HCT-116 | 0.0 |
| Colon ca. CaCo-2 | 0.0 |
| Colon cancer tissue | 0.0 |
| Colon ca. SW1116 | 0.0 |
| Colon ca. Colo-205 | 0.0 |
| Colon ca. SW-48 | 0.0 |
| Colon Pool | 0.0 |
| Small Intestine Pool | 0.0 |
| Stomach Pool | 0.0 |
| Bone Marrow Pool | 0.0 |
| Fetal Heart | 0.0 |
| Heart Pool | 0.0 |
| Lymph Node Pool | 0.0 |
| Fetal Skeletal Muscle | 0.0 |
| Skeletal Muscle Pool | 24.8 |
| Spleen Pool | 12.9 |
| Thymus Pool | 0.0 |
| CNS cancer (glio/astro) U87-MG | 0.0 |
| CNS cancer (glio/astro) U-118-MG | 0.1 |
| CNS cancer (neuro; met) SK-N-AS | 0.0 |
| CNS cancer (astro) SF-539 | 0.0 |
| CNS cancer (astro) SNB-75 | 0.0 |
| CNS cancer (glio) SNB-19 | 0.0 |
| CNS cancer (glio) SF-295 | 0.0 |
| Brain (Amygdala) Pool | 0.0 |
| Brain (cerebellum) | 0.0 |
| Brain (fetal) | 0.0 |
| Brain (Hippocampus) Pool | 0.0 |
| Cerebral Cortex Pool | 0.0 |
| Brain (Substantia nigra) Pool | 0.3 |
| Brain (Thalamus) Pool | 0.0 |
| Brain (whole) | 0.0 |
| Spinal Cord Pool | 0.0 |
| Adrenal Gland | 0.0 |
| Pituitary gland Pool | 0.0 |
| Salivary Gland | 0.0 |
| Thyroid (female) | 0.0 |
| Pancreatic ca. CAPAN2 | 0.0 |
| Pancreas Pool | 0.0 |

[0684] TABLE HC
Panel 4.1D

| | Rel. Exp. (%) |
|---|---|
| | Ag6267, Run |
| Tissue Name | 258921627 |
| Secondary Th1 act | 3.2 |
| Secondary Th2 act | 0.0 |
| Secondary Tr1 act | 1.7 |
| Secondary Th1 rest | 0.0 |
| Secondary Th2 rest | 0.0 |
| Secondary Tr1 rest | 0.0 |
| Primary Th1 act | 0.0 |
| Primary Th2 act | 0.0 |
| Primary Tr1 act | 0.0 |
| Primary Th1 rest | 0.0 |
| Primary Th2 rest | 0.0 |
| Primary Tr1 rest | 0.0 |
| CD45RA CD4 lymphocyte act | 0.0 |
| CD45RO CD4 lymphocyte act | 0.0 |
| CD8 lymphocyte act | 0.0 |
| Secondary CD8 lymphocyte rest | 0.0 |
| Secondary CD8 lymphocyte act | 0.0 |
| CD4 lymphocyte none | 0.0 |
| 2ry Th1/Th2/Tr1_anti-CD95 CH11 | 0.0 |
| LAK cells rest | 0.0 |
| LAK cells IL-2 | 0.0 |
| LAK cells IL-2 + IL-12 | 0.0 |
| LAK cells IL-2 + IFN gamma | 0.0 |
| LAK cells IL-2 + IL-18 | 0.0 |
| LAK cells PMA/ionomycin | 0.0 |
| NK Cells IL-2 rest | 0.0 |
| Two Way MLR 3 day | 0.6 |
| Two Way MLR 5 day | 0.0 |
| Two Way MLR 7 day | 0.0 |
| PBMC rest | 0.0 |
| PBMC PWM | 0.0 |
| PBMC PHA-L | 0.0 |
| Ramos (B cell) none | 0.0 |
| Ramos (B cell) ionomycin | 0.0 |
| B lymphocytes PWM | 0.0 |
| B lymphocytes CD40L and IL-4 | 1.3 |
| EOL-1 dbcAMP | 0.0 |
| EOL-1 dbcAMP PMA/ionomycin | 0.0 |
| Dendritic cells none | 0.0 |
| Dendritic cells LPS | 0.0 |
| Dendritic cells anti-CD40 | 0.0 |
| Monocytes rest | 0.0 |
| Monocytes LPS | 0.0 |
| Macrophages rest | 0.0 |
| Macrophages LPS | 0.0 |
| HUVEC none | 0.0 |
| HUVEC starved | 0.0 |
| HUVEC IL-1beta | 0.0 |
| HUVEC IFN gamma | 0.0 |
| HUVEC TNF alpha + IFN gamma | 0.0 |
| HUVEC TNF alpha + IL4 | 0.0 |
| HUVEC IL-11 | 0.0 |
| Lung Microvascular EC none | 0.0 |
| Lung Microvascular EC TNFalpha + IL-1beta | 0.0 |
| Microvascular Dermal EC none | 0.0 |
| Microsvasular Dermal EC TNFalpha + IL-1beta | 0.0 |
| Bronchial epithelium TNFalpha + IL1beta | 0.0 |
| Small airway epithelium none | 0.0 |
| Small airway epithelium TNFalpha + IL-1beta | 0.0 |
| Coronery artery SMC rest | 0.0 |
| Coronery artery SMC TNFalpha + IL-1beta | 0.0 |
| Astrocytes rest | 0.0 |
| Astrocytes TNFalpha + IL-1beta | 0.0 |
| KU-812 (Basophil) rest | 0.0 |
| KU-812 (Basophil) PMA/ionomycin | 1.1 |
| CCD1106 (Keratinocytes) none | 0.0 |
| CCD1106 (Keratinocytes) TNFalpha + IL-1beta | 0.0 |
| Liver cirrhosis | 0.0 |
| NCI-H292 none | 46.0 |
| NCI-H292 IL-4 | 59.9 |
| NCI-H292 IL-9 | 49.0 |
| NCI-H292 IL-13 | 100.0 |
| NCI-H292 IFN gamma | 62.4 |
| HPAEC none | 0.0 |
| HPAEC TNF alpha + IL-1 beta | 0.0 |
| Lung fibroblast none | 0.0 |
| Lung fibroblast TNF alpha + IL-1 beta | 0.0 |
| Lung fibroblast IL-4 | 0.0 |
| Lung fibroblast IL-9 | 0.0 |
| Lung fibroblast IL-13 | 0.0 |
| Lung fibroblast IFN gamma | 0.0 |
| Dermal fibroblast CCD1070 rest | 0.0 |
| Dermal fibroblast CCD1070 TNF alpha | 0.0 |
| Dermal fibroblast CCD1070 IL-1 beta | 0.0 |
| Dermal fibroblast IFN gamma | 0.0 |
| Dermal fibroblast IL-4 | 0.0 |
| Dermal Fibroblasts rest | 0.0 |
| Neutrophils TNFa + LPS | 0.0 |
| Neutrophils rest | 0.0 |
| Colon | 0.0 |
| Lung | 0.0 |
| Thymus | 0.0 |
| Kidney | 0.0 |

[0685] CNS_neurodegeneration_v1.0 Summary: Ag6267 Expression of this gene is low/undetectable (CTs>35) across all of the samples on this panel.

[0686] General_screening panel_v1.5 Summary: Ag6267 Highest expression of this gene is mainly seen in a lung cancer NCI-H23 cell line (CT=29.2). Therefore, expression of this gene may be used as diagnostic marker to detect the presence of lung cancer and also, therapeutic modulation of this gene may be useful in the treatment of lung cancer.

[0687] In addition, moderate expression of this gene is also seen in skeletal muscle and thymus. Therefore, therapeutic modulation of this gene through the use of small molecule drug may be useful in the treatment of muscle related diseases and T cell mediated autoimmune or inflammatory diseases, including asthma, allergies, inflammatory bowel disease, lupus erythematosus, or rheumatoid arthritis.

[0688] Panel 4.1D Summary: Ag6267 Highest expression of this gene is seen in IL-13 activated NCI-H292 cells (CT=31.3). Moderate expression of this gene is restricted to resting and activated NCI-H292 cells. The expression of this gene in this mucoepidermoid cell line that is often used as a model for airway epithelium (NCI-H292 cells) suggests that this gene may be important in the proliferation or activation of airway epithelium. Therefore, therapeutics designed with the protein encoded by this gene may reduce or eliminate symptoms caused by inflammation in lung epithelia in chronic obstructive pulmonary disease, asthma, allergy, and emphysema.

[0689] I. CG108945-02: Cation-transporting ATPase 1.

[0690] Expression of gene CG108945-02 was assessed using the primer-probe set Ag6263, described in Table IA. Results of the RTQ-PCR runs are shown in Tables IB and IC.

TABLE IA
Probe Name Ag6263

| | | | | |
|---|---|---|---|---|
| | | | Start | ID |
| Primers | Sequences | Length | Position | No |

| | | | | |
|---|---|---|---|---|
| Forward | 5′-tgaatggcgttaaggtcctg-3′20 | 2433 | 157 | |
| Probe | TET-5′-ttctgtagctcgcaccagctctgtctt-3′-TAMRA | 29 | 2492 | 158 |
| Reverse | 5′-gtgagaccactgaggcttctg-3′ | 21 | 2610 | 159 |

[0691] TABLE LB
CNS_neurodegeneration_v1.0

| | Rel. |
|---|---|
| | Exp4%) |
| | Ag6263, |
| | Run |
| Tissue Name | 258816990 |
| AD 1 Hippo | 3.7 |
| AD 2 Hippo | 37.4 |
| AD 3 Hippo | 0.7 |
| AD 4 Hippo | 14.5 |
| AD 5 hippo | 24.7 |
| AD 6 Hippo | 33.2 |
| Control 2 Hippo | 46.3 |
| Control 4 Hippo | 16.6 |
| Control (Path) 3 Hippo | 10.8 |
| AD 1 Temporal Ctx | 1.0 |
| AD 2 Temporal Ctx | 27.2 |
| AD 3 Temporal Ctx | 11.1 |
| AD 4 Temporal Ctx | 12.0 |
| AD 5 Inf Temporal Ctx | 21.8 |
| AD 5 SupTemporal Ctx | 14.0 |
| AD 6 Inf Temporal Ctx | 13.9 |
| AD 6 Sup Temporal Ctx | 11.7 |
| Control 1 Temporal Ctx | 4.1 |
| Control 2 Temporal Ctx | 99.3 |
| Control 3 Temporal Ctx | 13.3 |
| Control 4 Temporal Ctx | 4.9 |
| Control (Path) 1 Temporal Ctx | 56.3 |
| Control (Path) 2 Temporal Ctx | 32.8 |
| Control (Path) 3 Temporal Ctx | 2.2 |
| Control (Path) 4 Temporal Ctx | 22.4 |
| AD 1 Occipital Ctx | 2.2 |
| AD 2 Occipital Ctx (Missing) | 0.0 |
| AD 3 Occipital Ctx | 0.0 |
| AD 4 Occipital Ctx | 20.9 |
| AD 5 Occipital Ctx | 11.8 |
| AD 6 Occipital Ctx | 43.5 |
| Control 1 Occipital Ctx | 10.7 |
| Control 2 Occipital Ctx | 65.1 |
| Control 3 Occipital Ctx | 10.4 |
| Control 4 Occipital Ctx | 3.0 |
| Control (Path) 1 Occipital Ctx | 88.3 |
| Control (Path) 2 Occipital Ctx | 6.7 |
| Control (Path) 3 Occipital Ctx | 1.3 |
| Control (Path) 4 Occipital Ctx | 12.3 |
| Control 1 Parietal Ctx | 3.9 |
| Control 2 Parietal Ctx | 5.7 |
| Control 3 Parietal Ctx | 13.9 |
| Control (Path) 1 Parietal Ctx | 100.0 |
| Control (Path) 2 Parietal Ctx | 17.1 |
| Control (Path) 3 Parietal Ctx | 1.4 |
| Control (Path) 4 Parietal Ctx | 64.2 |

[0692] TABLE IC
General_screening_panel_v1.5

| | Rel. Exp. (%) |
|---|---|
| | Ag6263, |
| | Run |
| Tissue Name | 258875091 |
| Adipose | 1.9 |
| Melanoma* Hs688(A).T | 9.9 |
| Melanoma* Hs688(B).T | 16.2 |
| Melanoma* M14 | 12.9 |
| Melanoma* LOXIMVI | 5.8 |
| Melanoma* SK-MEL-5 | 13.8 |
| Squamous cell carcinoma SCC-4 | 9.9 |
| Testis Pool | 6.2 |
| Prostate ca.* (bone met) PC-3 | 0.4 |
| Prostate Pool | 1.7 |
| Placenta | 6.5 |
| Uterus Pool | 0.4 |
| Ovarian ca. OVCAR-3 | 2.0 |
| Ovarian ca. SK-OV-3 | 23.7 |
| Ovarian ca. OVCAR-4 | 5.2 |
| Ovarian ca. OVCAR-5 | 25.3 |
| Ovarian ca. IGROV-1 | 42.6 |
| Ovarian ca. OVCAR-8 | 92.0 |
| Ovary | 1.8 |
| Breast ca. MCF-7 | 39.2 |
| Breast ca. MDA-MB-231 | 30.4 |
| Breast ca. BT 549 | 15.1 |
| Breast ca. T47D | 6.8 |
| Breast ca. MDA-N | 12.3 |
| Breast Pool | 1.5 |
| Trachea | 5.9 |
| Lung | 0.5 |
| Fetal Lung | 6.1 |
| Lung ca. NCI-N417 | 4.3 |
| Lung ca. LX-1 | 19.9 |
| Lung ca. NCI-H146 | 8.7 |
| Lung ca. SHP-77 | 32.3 |
| Lung ca. A549 | 11.4 |
| Lung ca. NCI-H526 | 10.2 |
| Lung ca. NCI-H23 | 12.2 |
| Lung ca. NCI-H460 | 13.2 |
| Lung ca. HOP-62 | 10.4 |
| Lung ca. NCI-H522 | 14.0 |
| Liver | 0.3 |
| Fetal Liver | 3.8 |
| Liver ca. HepG2 | 16.7 |
| Kidney Pool | 6.1 |
| Fetal Kidney | 4.6 |
| Renal ca. 786-0 | 9.6 |
| Renal ca. A498 | 4.7 |
| Renal ca. ACHN | 5.8 |
| Renal ca. UO-31 | 18.0 |
| Renal ca. TK-10 | 17.8 |
| Bladder | 15.4 |
| Gastric ca. (liver met.) NCI-N87 | 44.8 |
| Gastric ca. KATO III | 70.7 |
| Colon ca. SW-948 | 10.4 |
| Colon ca. SW480 | 50.3 |
| Colon ca.* (SW480 met) SW620 | 28.3 |
| Colon ca. HT29 | 17.4 |
| Colon ca. HCT-116 | 33.9 |
| Colon ca. CaCo-2 | 12.6 |
| Colon cancer tissue | 11.4 |
| Colon ca. SW1116 | 11.0 |
| Colon ca. Colo-205 | 1.7 |
| Colon ca. SW-48 | 13.0 |
| Colon Pool | 1.5 |
| Small Intestine Pool | 2.3 |
| Stomach Pool | 0.6 |
| Bone Marrow Pool | 0.3 |
| Fetal Heart | 0.7 |
| Heart Pool | 2.0 |
| Lymph Node Pool | 4.5 |
| Fetal Skeletal Muscle | 2.4 |
| Skeletal Muscle Pool | 5.2 |
| Spleen Pool | 1.4 |
| Thymus Pool | 2.1 |
| CNS cancer (glio/astro) U87-MG | 11.3 |
| CNS cancer (glio/astro) U-118-MG | 12.5 |
| CNS cancer (neuro; met) SK-N-AS | 12.9 |
| CNS cancer (astro) SF-539 | 19.5 |
| CNS cancer (astro) SNB-75 | 31.6 |
| CNS cancer (glio) SNB-19 | 25.9 |
| CNS cancer (glio) SF-295 | 86.5 |
| Brain (Amygdala) Pool | 61.1 |
| Brain (cerebellum) | 89.5 |
| Brain (fetal) | 100.0 |
| Brain (Hippocampus) Pool | 88.3 |
| Cerebral Cortex Pool | 95.9 |
| Brain (Substantia nigra) Pool | 88.3 |
| Brain (Thalamus) Pool | 89.5 |
| Brain (whole) | 97.3 |
| Spinal Cord Pool | 27.2 |
| Adrenal Gland | 3.3 |
| Pituitary gland Pool | 2.6 |
| Salivary Gland | 6.9 |
| Thyroid (female) | 3.9 |
| Pancreatic ca. CAPAN2 | 4.6 |
| Pancreas Pool | 6.3 |

[0693] CNS_neurodegeneration_v1.0 Summary: Ag6263 This panel confirms the expression of this gene at low levels in the brain in an independent group of individuals. This gene is found to be slightly down-regulated in the temporal cortex of Alzheimer's disease patients. Therefore, up-regulation of this gene or its protein product, or treatment with specific agonists for this receptor may be of use in reversing the dementia/memory loss associated with this disease and neuronal death.

[0694] General_screening panel_v1.5 Summary: Ag6263 Highest expression of this gene is detected in fetal brain and all the adult brain region including amygdala, hippocampus, substantia nigra, thalamus, cerebellum, and cerebral cortex (CTs=30). Moderate expression of this gene is also seen in spinal cord. Therefore, therapeutic modulation of this gene product may be useful in the treatment of central nervous system disorders such as Alzheimer's disease, Parkinson's disease, epilepsy, multiple sclerosis, schizophrenia and depression.

[0695] Moderate to low levels of expression of this gene is also seen in cluster of cancer cell lines derived from pancreatic, gastric, colon, lung, liver, renal, breast, ovarian, prostate, squamous cell carcinoma, melanoma and brain cancers. Thus, expression of this gene could be used as a marker to detect the presence of these cancers. Furthermore, therapeutic modulation of the expression or function of this gene may be effective in the treatment of pancreatic, gastric, colon, lung, liver, renal, breast, ovarian, prostate, squamous cell carcinoma, melanoma and brain cancers.

[0696] Among tissues with metabolic or endocrine function, this gene is expressed at low levels in pancreas, thyroid, skeletal muscle, and fetal liver. Therefore, therapeutic modulation of the activity of this gene may prove useful in the treatment of endocrine/metabolically related diseases, such as obesity and diabetes.

[0697] Interestingly, this gene is expressed at much higher levels in fetal (CTs=34-34.8) when compared to adult lung and liver (CTs=38). This observation suggests that expression of this gene can be used to distinguish fetal from adult liver. In addition, the relative overexpression of this gene in fetal tissue suggests that the protein product may enhance liver growth or development in the fetus and thus may also act in a regenerative capacity in the adult. Therefore, therapeutic modulation of the protein encoded by this gene could be useful in treatment of liver related diseases.

[0698] Panel 4.1D Summary: Ag6263 Expression of this gene is low/undetectable (CTs>35) across all of the samples on this panel.

[0699] J. CG167893-01: P450.

[0700] Expression of gene CG167893-01 was assessed using the primer-probe set Ag6107, described in Table JA.

TABLE JA
Probe Name Ag6107

| | | | | SEQ |
|---|---|---|---|---|
| | | | Start | ID |
| Primers | Sequences | Length | Position | No |
| Forward | 5′-gaagttctctcattcaactcttcgt-3′ | 25 | 564 | 160 |
| Probe | TET-5′-cgaggcctagaaatctgtctgaacagtcaagt-3′-TAMRA | 32 | 799 | 161 |
| Reverse | 5′-ccaatgatataaaataagtactcttcatca-3′ | 30 | 1041 | 162 |

[0701] CNS-neurodegeneration_v1.0 Summary: Ag6107 Expression of this gene is low/undetectable in all samples on this panel (CTs>35).

[0702] General_screening panel_v1.5 Summary: Ag6107 Expression of this gene is low/undetectable in all samples on this panel (CTs>35).

[0703] K CG169088-01: Plasma Membrane Calcium-transporting ATPase 3.

[0704] Expression of gene CG169088-01 was assessed using the primer-probe set Ag6111, described in Table KA.

TABLE KA
Probe Name Ag6111

| | | | Start | SEQ ID |
|---|---|---|---|---|
| Primers | Sequences | Length | Position | No |
| Forward | 5′-agcttcatgacgtaaccaatctt-3′ | 23 | 3479 | 163 |
| Probe | TET-5′-ctacccctactcacatccgggtggt-3′-TAMRA | 25 | 3503 | 164 |
| Reverse | 5′-gtttctccaggccttcatagag-3′ | 22 | 3547 | 165 |

[0705] CNS_neurodegeneration_v1.0 Summary: Ag6111 Expression of this gene is low/undetectable in all samples on this panel (CTs>35).

[0706] General_screening panel_v1.5 Summary: Ag61 μl Expression of this gene is low/undetectable in all samples on this panel (CTs>35).

[0707] Panel 4.1D Summary: Ag6111 Expression of this gene is low/undetectable in all samples on this panel (CTs>35).

[0708] L. CG169201-01: Potential Phospholipid-transporting ATPase IH.

[0709] Expression of gene CG169201-01 was assessed using the primer-probe sets Ag6123, Ag7799 and Ag7814, described in Tables LA, LB and LC. Results of the RTQ-PCR runs are shown in Tables LD, LE and LF.

TABLE LA
Probe Name Ag6123

| | | | Start | SEQ |
|---|---|---|---|---|
| Primers | Sequences | Length | Position | ID No |
| Forward | 5′-gacagaacatcaggaatatggattaat-3′ | 27 | 2677 | 166 |
| Probe | TET-5′-catagatggctccacatttgtcactca-3′-TAMRA | 26 | 2704 | 167 |
| Reverse | 5′-gtaattgtttgaactagagtcttgactagaat-3′ | 32 | 2736 | 168 |

[0710] TABLE LB
Probe Name Ag7799

| | | | | SEQ |
|---|---|---|---|---|
| | | | Start | ID |
| Primers | Sequences | Length | Position | No |
| Forward | 5′-cacacgcacagtgtttgttg-3′ | 20 | 508 | 169 |
| Probe | TET-5′-tcatccagtttcggaaacagaagcttacat-3′-TAMRA | 30 | 532 | 170 |
| Reverse | 5′-attccaaagtgtatacttagatgagactattc-3′ | 32 | 585 | 171 |

[0711] TABLE LC
Probe Name Ag7814

| | | | | SEQ |
|---|---|---|---|---|
| | | | Start | ID |
| Primers | Sequences | Length | Position | No |
| Forward | 5′-tttgttgqcaatcatccagt-3′ | 20 | 521 | 172 |
| Probe | TET-5′-tcacaaaatctttgtgcaatgtaagcttct-3′-TAMRA | 30 | 550 | 173 |
| Reverse | 5′-aaattccaaagtgtatacttagatgagac-3′ | 29 | 590 | 174 |

[0712] TABLE LD
CNS_neurodegeneration_v1.0

| | Rel. Exp. (%) |
|---|---|
| | Ag7799, |
| | Run |
| Tissue Name | 312372413 |
| AD 1 Hippo | 21.8 |
| AD 2 Hippo | 18.9 |
| AD 3 Hippo | 10.0 |
| AD 4 Hippo | 5.3 |
| AD 5 hippo | 9.2 |
| AD 6 Hippo | 100.0 |
| Control 2 Hippo | 29.3 |
| Control 4 Hippo | 25.2 |
| Control (Path) 3 Hippo | 17.0 |
| AD 1 Temporal Ctx | 49.3 |
| AD 2 Temporal Ctx | 22.5 |
| AD 3 Temporal Ctx | 10.2 |
| AD 4 Temporal Ctx | 18.9 |
| AD 5 Inf Temporal Ctx | 5.3 |
| AD 5 Sup Temporal Ctx | 5.4 |
| AD 6 Inf Temporal Ctx | 86.5 |
| AD 6 Sup Temporal Ctx | 84.1 |
| Control 1 Temporal Ctx | 8.6 |
| Control 2 Temporal Ctx | 34.9 |
| Control 3 Temporal Ctx | 19.3 |
| Control 4 Temporal Ctx | 14.4 |
| Control (Path) 1 Temporal Ctx | 47.3 |
| Control (Path) 2 Temporal Ctx | 31.4 |
| Control (Path) 3 Temporal Ctx | 13.8 |
| Control (Path) 4 Temporal Ctx | 42.6 |
| AD 1 Occipital Ctx | 23.8 |
| AD 2 Occipital Ctx (Missing) | 0.0 |
| AD 3 Occipital Ctx | 17.3 |
| AD 4 Occipital Ctx | 11.7 |
| AD 5 Occipital Ctx | 30.6 |
| AD 6 Occipital Ctx | 24.1 |
| Control 1 Occipital Ctx | 14.4 |
| Control 2 Occipital Ctx | 37.6 |
| Control 3 Occipital Ctx | 20.6 |
| Control 4 Occipital Ctx | 8.1 |
| Control (Path) 1 Occipital Ctx | 19.1 |
| Control (Path) 2 Occipital Ctx | 14.9 |
| Control (Path) 3 Occipital Ctx | 14.1 |
| Control (Path) 4 Occipital Ctx | 36.3 |
| Control 1 Parietal Ctx | 12.5 |
| Control 2 Parietal Ctx | 87.1 |
| Control 3 Parietal Ctx | 13.7 |
| Control (Path) 1 Parietal Ctx | 32.1 |
| Control (Path) 2 Parietal Ctx | 18.3 |
| Control (Path) 3 Parietal Ctx | 21.9 |
| Control (Path) 4 Parietal Ctx | 39.2 |

[0713] TABLE LE
General_screening_panel_v1.5

| | Rel. Exp. (%) |
|---|---|
| | Ag6123, |
| | Run |
| Tissue Name | 259048762 |
| Adipose | 11.7 |
| Melanoma* Hs688(A).T | 23.5 |
| Melanoma* Hs688(B).T | 39.0 |
| Melanoma* M14 | 28.5 |
| Melanoma* LOXIMVI | 25.3 |
| Melanoma* SK-MEL-5 | 33.9 |
| Squamous cell carcinoma SCC-4 | 10.9 |
| Testis Pool | 8.7 |
| Prostate ca.* (bone met) PC-3 | 42.3 |
| Prostate Pool | 11.5 |
| Placenta | 1.1 |
| Uterus Pool | 17.7 |
| Ovarian ca. OVCAR-3 | 42.3 |
| Ovarian ca. SK-OV-3 | 38.7 |
| Ovarian ca. OVCAR-4 | 15.4 |
| Ovarian ca. OVCAR-5 | 27.4 |
| Ovarian ca. IGROV-1 | 14.6 |
| Ovarian ca. OVCAR-8 | 8.4 |
| Ovary | 12.3 |
| Breast ca. MCF-7 | 41.5 |
| Breast ca. MDA-MB-231 | 27.2 |
| Breast ca. BT 549 | 100.0 |
| Breast ca. T47D | 3.3 |
| Breast ca. MDA-N | 22.2 |
| Breast Pool | 24.5 |
| Trachea | 8.0 |
| Lung | 5.5 |
| Fetal Lung | 22.1 |
| Lung ca. NCI-N417 | 20.2 |
| Lung ca. LX-1 | 32.3 |
| Lung ca. NCI-H146 | 2.9 |
| Lung ca. SHP-77 | 36.3 |
| Lung ca. A549 | 25.2 |
| Lung ca. NCI-H526 | 9.0 |
| Lung ca. NCI-H23 | 28.1 |
| Lung ca. NCI-H460 | 37.9 |
| Lung ca. HOP-62 | 20.0 |
| Lung ca. NCI-H522 | 61.1 |
| Liver | 1.6 |
| Fetal Liver | 16.3 |
| Liver ca. HepG2 | 9.8 |
| Kidney Pool | 21.8 |
| Fetal Kidney | 20.2 |
| Renal ca. 786-0 | 35.4 |
| Renal ca. A498 | 11.0 |
| Renal ca. ACHN | 14.4 |
| Renal ca. UO-31 | 13.3 |
| Renal ca. TK-10 | 20.7 |
| Bladder | 17.6 |
| Gastric ca. (liver met.) NCI-N87 | 36.1 |
| Gastric ca. KATO III | 44.8 |
| Colon ca. SW-948 | 1.1 |
| Colon ca. SW480 | 94.0 |
| Colon ca.* (SW480 met) SW620 | 54.3 |
| Colon ca. HT29 | 1.7 |
| Colon ca. HCT-116 | 21.9 |
| Colon ca. CaCo-2 | 20.9 |
| Colon cancer tissue | 17.6 |
| Colon ca. SW1116 | 5.2 |
| Colon ca. Colo-205 | 0.3 |
| Colon ca. SW-48 | 3.6 |
| Colon Pool | 21.8 |
| Small Intestine Pool | 16.3 |
| Stomach Pool | 12.6 |
| Bone Marrow Pool | 8.8 |
| Fetal Heart | 4.4 |
| Heart Pool | 5.2 |
| Lymph Node Pool | 25.2 |
| Fetal Skeletal Muscle | 3.6 |
| Skeletal Muscle Pool | 7.1 |
| Spleen Pool | 18.9 |
| Thymus Pool | 19.6 |
| CNS cancer (glio/astro) U87-MG | 31.6 |
| CNS cancer (glio/astro) U-118-MG | 34.6 |
| CNS cancer (neuro; met) SK-N-AS | 97.3 |
| CNS cancer (astro) SF-539 | 10.2 |
| CNS cancer (astro) SNB-75 | 55.5 |
| CNS cancer (glio) SNB-19 | 17.1 |
| CNS cancer (glio) SF-295 | 46.0 |
| Brain (Amygdala) Pool | 2.4 |
| Brain (cerebellum) | 8.0 |
| Brain (fetal) | 18.9 |
| Brain (Hippocampus) Pool | 5.0 |
| Cerebral Cortex Pool | 3.7 |
| Brain (Substantia nigra) Pool | 2.4 |
| Brain (Thalamus) Pool | 4.6 |
| Brain (whole) | 2.4 |
| Spinal Cord Pool | 4.6 |
| Adrenal Gland | 5.7 |
| Pituitary gland Pool | 0.8 |
| Salivary Gland | 2.0 |
| Thyroid (female) | 2.4 |
| Pancreatic ca. CAPAN2 | 38.7 |
| Pancreas Pool | 20.2 |

[0714] TABLE LF
Panel 5 Islet

| | Rel. Exp. (%) |
|---|---|
| | Ag6123, |
| | Run |
| Tissue Name | 253579196 |
| 97457_Patient-02go_adipose | 19.3 |
| 97476_Patient-07sk_skeletal muscle | 6.5 |
| 97477_Patient-07ut_uterus | 21.2 |
| 97478_Patient-07pl_placenta | 10.4 |
| 99167_Bayer Patient 1 | 1.2 |
| 97482_Patient-08ut_uterus | 13.3 |
| 97483_Patient-08pl_placenta | 7.5 |
| 97486_Patient-09sk_skeletal muscle | 4.0 |
| 97487_Patient-09ut_uterus | 21.2 |
| 97488_Patient-09pl_placenta | 7.4 |
| 97492_Patient-10ut_uterus | 20.4 |
| 97493_Patient-10pl_placenta | 15.5 |
| 97495_Patient-11go_adipose | 16.6 |
| 97496_Patient-11sk_skeletal muscle | 5.0 |
| 97497_Patient-11ut_uterus | 29.1 |
| 97498_Patient-11pl_placenta | 6.7 |
| 97500_Patient-12go_adipose | 17.7 |
| 97501_Patient-12sk_skeletal muscle | 8.3 |
| 97502_Patient-12ut_uterus | 40.9 |
| 97503_Patient-12pl_placenta | 10.0 |
| 94721_Donor 2 U - A_Mesenchymal Stem Cells | 40.1 |
| 94722_Donor 2 U - B_Mesenchymal Stem Cells | 29.5 |
| 94723_Donor 2 U - C_Mesenchymal Stem Cells | 28.7 |
| 94709_Donor 2 AM - A_adipose | 95.3 |
| 94710_Donor 2 AM - B_adipose | 42.0 |
| 94711_Donor 2 AM - C_adipose | 40.1 |
| 94712_Donor 2 AD - A_adipose | 54.7 |
| 94713_Donor 2 AD - B_adipose | 94.0 |
| 94714_Donor 2 AD - C_adipose | 81.8 |
| 94742_Donor 3 U - A_Mesenchymal Stem Cells | 26.4 |
| 94743_Donor 3 U - B_Mesenchymal Stem Cells | 35.6 |
| 94730_Donor 3 AM - A_adipose | 100.0 |
| 94731_Donor 3 AM - B_adipose | 61.6 |
| 94732_Donor 3 AM - C_adipose | 72.7 |
| 94733_Donor 3 AD - A_adipose | 50.3 |
| 94734_Donor 3 AD - B_adipose | 55.5 |
| 94735_Donor 3 AD - C_adipose | 67.4 |
| 77138_Liver_HepG2untreated | 47.0 |
| 73556_Heart_Cardiac stromal cells (primary) | 20.9 |
| 81735_Small Intestine | 19.3 |
| 72409_Kidney_Proximal Convoluted Tubule | 37.6 |
| 82685_Small intestine_Duodenum | 15.5 |
| 90650_Adrenal_Adrenocortical adenoma | 9.5 |
| 72410_Kidney_HRCE | 52.9 |
| 72411_Kidney_HRE | 36.3 |
| 73139_Uterus_Uterine smooth muscle cells | 33.7 |

[0715] CNS_neurodegeneration_v1.0 Summary: Ag7799 This panel does not show differential expression of this gene in Alzheimer's disease. However, this profile confirms the expression of this gene at moderate levels in the brain. Please see Panel 1.5 for discussion of this gene in the central nervous system.

[0716] General_screening panel_v1.5 Summary: Ag6123 Highest expression of this gene is seen in a breast cancer cell line (CT=27.9). This gene is widely expressed in this panel, with moderate expression seen in brain, colon, gastric, lung, breast, ovarian, and melanoma cancer cell lines. This expression profile suggests a role for this gene product in cell survival and proliferation. Modulation of this gene product may be useful in the treatment of cancer.

[0717] Among tissues with metabolic function, this gene is expressed at moderate to low levels in pituitary, adipose, adrenal gland, pancreas, thyroid, and adult and fetal skeletal muscle, heart, and liver. This widespread expression among these tissues suggests that this gene product may play a role in normal neuroendocrine and metabolic function and that disregulated expression of this gene may contribute to neuroendocrine disorders or metabolic diseases, such as obesity and diabetes.

[0718] In addition, this gene is expressed at much higher levels in fetal lung, liver and skeletal muscle tissue (CTs=27-29) when compared to expression in the adult counterpart (CTs=30-32). Thus, expression of this gene may be used to differentiate between the fetal and adult source of these tissue

[0719] Interestingly, this gene is expressed at much higher levels in fetal liver tissue (CT=30.5) when compared to the level of expression in the adult counterpart (CT=33.8). This observation suggests that expression of this gene can be used to distinguish between the fetal and adult sources of this tissue. In addition, the relative overexpression of this gene in fetal liver suggests that the protein product may enhance the growth or development of this organ in the fetus and thus may also act in a regenerative capacity in the adult. Therefore, therapeutic modulation of the protein encoded by this gene could be useful in treatment of liver related diseases.

[0720] This gene is also expressed at low but significant levels in the CNS, including the hippocampus, thalamus, substantia nigra, amygdala, cerebellum and cerebral cortex. Therefore, therapeutic modulation of the expression or function of this gene may be useful in the treatment of neurologic disorders, such as Alzheimer's disease, Parkinson's disease, schizophrenia, multiple sclerosis, stroke and epilepsy.

[0721] Panel 5 Islet Summary: Ag6123 Highest expression of this gene is seen in adipose (CT=31.1). Moderate to low levels of expression are seen in other metabolic tissues, including placenta and skeletal muscle. Please see Panel 1.5 for discussion of this gene in metabolic disease.

[0722] M. CG50303-03: Olfactory Receptor.

[0723] Expression of gene CG50303-03 was assessed using the primer-probe sets Ag1501, Ag1585, Ag2377, Ag2607 and Ag2610, described in Tables MA, MB, MC, MD and ME. Results of the RTQ-PCR runs are shown in Tables MF, MG, MH, MI, MJ, MK and ML.

TABLE MA
Probe Name Ag1501

| | | | Start | SEQ ID |
|---|---|---|---|---|
| Primers | Sequences | Length | Position | No |
| Forward | 5′-catagctgacacccacctacat-3′ | 22 | 159 | 175 |
| Probe | TET-5′-cacccatgtacttcttcctgggcaat-3′-TAMRA | 26 | 182 | 176 |
| Reverse | 5′-ctgcagtcatggttaccaagat-3′ | 22 | 223 | 177 |

[0724] TABLE MB
Probe Name Ag1585

| | | | Start | SEQ |
|---|---|---|---|---|
| Primers | Sequences | Length | Position | ID No |
| Forward | 5′-catagctgacacccacctacat-3′ | 22 | 159 | 178 |
| Probe | TET-5′-cacccatgtacttcttcctgggcaat-3′-TAMRA | 26 | 182 | 179 |
| Reverse | 5′-ctgcagtcatggttaccaagat-3′ | 22 | 223 | 180 |

[0725] TABLE MC
Probe Name Ag2377

| | | | Start | SEQ |
|---|---|---|---|---|
| Primers | Sequences | Length | Position | ID No |
| Forward | 5′-atgggaaacaccatcatcatag-3′ | 22 | 159 | 181 |
| Probe | TET-5′-tggtcatagctgacacccacctacat-3′-TAMRA | 26 | 155 | 182 |
| Reverse | 5′-aattgcccaggaagaagtacat-3′ | 22 | 187 | 183 |

[0726] TABLE MD
Probe Name Ag2607

| | | | Start | SEQ |
|---|---|---|---|---|
| Primers | Sequences | Length | Position | ID No |
| Forward | 5′-catagctgacacccacctacat-3′ | 22 | 159 | 184 |
| Probe | TET-5′-cacccatgtacttcttcctgggcaat-3′-TAMRA | 26 | 182 | 185 |
| Reverse | 5′-actgcagtcatggttaccaaga-3′ | 22 | 224 | 186 |

[0727] TABLE ME
Probe Name Ag2610

| | | | Start | SEQ |
|---|---|---|---|---|
| Primers | Sequences | Length | Position | ID No |
| Forward | 5′-gtctcacctcacactggtcttc-3′ | 22 | 738 | 187 |
| Probe | TET-5′-catctttctgtatgtcaggcctggca-3′-TAMRA | 26 | 777 | 188 |
| Reverse | 5′-ctgacttgcacagagtgagctt-3′ | 22 | 803 | 189 |

[0728] TABLE MF
CNS_neurodegeneration_v1.0

| | Rel. Exp. (%) | Rel. Exp. (%) | Rel. Exp. (%) |
|---|---|---|---|
| | Ag2377, Run | Ag2607, Run | Ag2610, Run |
| Tissue Name | 208271229 | 208971580 | 208393679 |
| AD 1 Hippo | 9.2 | 4.5 | 14.9 |
| AD 2 Hippo | 10.7 | 15.1 | 45.7 |
| AD 3 Hippo | 8.8 | 8.5 | 18.7 |
| AD 4 Hippo | 7.2 | 9.0 | 4.8 |
| AD 5 hippo | 32.5 | 44.4 | 48.0 |
| AD 6 Hippo | 100.0 | 35.6 | 33.9 |
| Control 2 | 24.0 | 33.4 | 22.5 |
| Hippo | | | |
| Control 4 | 5.6 | 7.4 | 13.9 |
| Hippo | | | |
| Control (Path) | 4.0 | 6.2 | 0.0 |
| 3 Hippo | | | |
| AD 1 | 36.6 | 60.3 | 27.4 |
| Temporal Ctx | | | |
| AD 2 | 18.3 | 39.5 | 46.3 |
| Temporal Ctx | | | |
| AD 3 | 10.1 | 10.3 | 18.9 |
| Temporal Ctx | | | |
| AD 4 | 30.4 | 52.5 | 31.9 |
| Temporal Ctx | | | |
| AD 5 Inf | 35.1 | 85.3 | 52.5 |
| Temporal Ctx | | | |
| AD 5 | 10.7 | 36.6 | 28.7 |
| SupTemporal | | | |
| Ctx | | | |
| AD 6 Inf | 27.5 | 87.7 | 60.7 |
| Temporal Ctx | | | |
| AD 6 Sup | 22.4 | 72.2 | 52.5 |
| Temporal Ctx | | | |
| Control 1 | 3.9 | 15.6 | 6.0 |
| Temporal Ctx | | | |
| Control 2 | 7.6 | 11.6 | 13.0 |
| Temporal Ctx | | | |
| Control 3 | 9.7 | 12.6 | 4.4 |
| Temporal Ctx | | | |
| Control 4 | 11.5 | 15.4 | 6.8 |
| Temporal Ctx | | | |
| Control (Path) | 43.8 | 67.4 | 36.3 |
| 1 Temporal Ctx | | | |
| Control (Path) | 17.8 | 35.6 | 22.4 |
| 2 Temporal Ctx | | | |
| Control (Path) | 1.4 | 1.4 | 0.0 |
| 3 Temporal | | | |
| Ctx | | | |
| Control (Path) | 18.2 | 35.1 | 36.9 |
| 4 Temporal | | | |
| Ctx | | | |
| AD 1 | 16.3 | 35.6 | 17.7 |
| Occipital | | | |
| Ctx | | | |
| AD 2 | 0.0 | 0.0 | 0.0 |
| Occipital | | | |
| Ctx | | | |
| (Missing) | | | |
| AD 3 | 10.3 | 13.0 | 18.9 |
| Occipital | | | |
| Ctx | | | |
| AD 4 | 16.4 | 57.4 | 20.0 |
| Occipital | | | |
| Ctx | | | |
| AD 5 | 11.8 | 27.5 | 22.4 |
| Occipital | | | |
| Ctx | | | |
| AD 6 | 3.6 | 18.0 | 13.6 |
| Occipital | | | |
| Ctx | | | |
| Control 1 | 7.2 | 7.7 | 2.6 |
| Occipital | | | |
| Ctx | | | |
| Control 2 | 0.1 | 55.5 | 25.3 |
| Occipital | | | |
| Ctx | | | |
| Control 3 | 19.3 | 29.1 | 32.3 |
| Occipital | | | |
| Ctx | | | |
| Control 4 | 10.0 | 20.9 | 8.2 |
| Occipital | | | |
| Ctx | | | |
| Control | 62.9 | 100.0 | 100.0 |
| (Path) 1 | | | |
| Occipital | | | |
| Ctx | | | |
| Control | 23.5 | 47.6 | 12.9 |
| (Path) 2 | | | |
| Occipital | | | |
| Ctx | | | |
| Control | 1.1 | 2.2 | 5.2 |
| (Path) 3 | | | |
| Occipital | | | |
| Ctx | | | |
| Control | 30.8 | 46.0 | 39.2 |
| (Path) 4 | | | |
| Occipital | | | |
| Ctx | | | |
| Control 1 | 14.3 | 35.1 | 10.0 |
| Parietal | | | |
| Ctx | | | |
| Control 2 | 17.4 | 61.1 | 30.6 |
| Parietal | | | |
| Ctx | | | |
| Control 3 | 15.5 | 26.2 | 25.7 |
| Parietal | | | |
| Ctx | | | |
| Control | 27.2 | 60.3 | 64.6 |
| (Path) 1 | | | |
| Parietal | | | |
| Ctx | | | |
| Control | 57.0 | 54.7 | 43.8 |
| (Path) 2 | | | |
| Parietal | | | |
| Ctx | | | |
| Control | 2.0 | 0.0 | 7.3 |
| (Path) 3 | | | |
| Parietal | | | |
| Ctx | | | |
| Control | 48.3 | 65.5 | 82.9 |
| (Path) 4 | | | |
| Parietal | | | |
| Ctx | | | |

[0729] TABLE MG
Panel 1.2

| | Rel. Exp. (%) |
|---|---|
| | Ag1501, |
| | Run |
| Tissue Name | 140466099 |
| Endothelial cells | 6.8 |
| Heart (Fetal) | 0.3 |
| Pancreas | 0.6 |
| Pancreatic ca. CAPAN 2 | 0.3 |
| Adrenal Gland | 16.4 |
| Thyroid | 0.0 |
| Salivary gland | 38.2 |
| Pituitary gland | 1.2 |
| Brain (fetal) | 20.6 |
| Brain (whole) | 13.3 |
| Brain (amygdala) | 17.2 |
| Brain (cerebellum) | 7.0 |
| Brain (hippocampus) | 67.4 |
| Brain (thalamus) | 92.0 |
| Cerebral Cortex | 85.3 |
| Spinal cord | 25.0 |
| glio/astro U87-MG | 17.0 |
| glio/astro U-118-MG | 5.5 |
| astrocytoma SW1783 | 7.2 |
| neuro*; met SK-N-AS | 1.5 |
| astrocytoma SF-539 | 2.4 |
| astrocytoma SNB-75 | 14.2 |
| glioma SNB-19 | 23.5 |
| glioma U251 | 6.9 |
| glioma SF-295 | 18.8 |
| Heart | 50.7 |
| Skeletal Muscle | 13.2 |
| Bone marrow | 7.5 |
| Thymus | 0.0 |
| Spleen | 4.6 |
| Lymph node | 2.9 |
| Colorectal Tissue | 9.3 |
| Stomach | 0.7 |
| Small intestine | 6.5 |
| Colon ca. SW480 | 1.5 |
| Colon ca.* SW620 (SW480 met) | 16.2 |
| Colon ca. HT29 | 14.7 |
| Colon ca. HCT-116 | 7.6 |
| Colon ca. CaCo-2 | 9.4 |
| Colon ca. Tissue (ODO3866) | 31.2 |
| Colon ca. HCC-2998 | 10.3 |
| Gastric ca.* (liver met) NCI-N87 | 21.3 |
| Bladder | 36.6 |
| Trachea | 0.0 |
| Kidney | 35.8 |
| Kidney (fetal) | 14.9 |
| Renal ca. 786-0 | 14.3 |
| Renal ca. A498 | 12.6 |
| Renal ca. RXF 393 | 15.9 |
| Renal ca. ACHN | 11.8 |
| Renal ca. UO-31 | 21.0 |
| Renal ca. TK-10 | 28.3 |
| Liver | 7.6 |
| Liver (fetal) | 5.1 |
| Liver ca. (hepatoblast) HepG2 | 9.9 |
| Lung | 0.0 |
| Lung (fetal) | 0.9 |
| Lung ca. (small cell) LX-1 | 33.9 |
| Lung ca. (small cell) NCI-H69 | 58.6 |
| Lung ca. (s. cell var.) SHP-77 | 3.6 |
| Lung ca. (large cell)NCI-H460 | 24.0 |
| Lung ca. (non-sm. cell) A549 | 30.8 |
| Lung ca. (non-s. cell) NCI-H23 | 81.8 |
| Lung ca. (non-s. cell) HOP-62 | 24.3 |
| Lung ca. (non-s. cl) NCI-H522 | 59.0 |
| Lung ca. (squam.) SW 900 | 10.4 |
| Lung ca. (squam.) NCI-H596 | 25.7 |
| Mammary gland | 15.3 |
| Breast ca.* (pl. ef) MCF-7 | 2.1 |
| Breast ca.* (pl. ef) MDA-MB-231 | 2.3 |
| Breast ca.* (pl. ef) T47D | 88.9 |
| Breast ca. BT-549 | 6.1 |
| Breast ca. MDA-N | 74.7 |
| Ovary | 0.7 |
| Ovarian ca. OVCAR-3 | 14.3 |
| Ovarian ca. OVCAR-4 | 40.3 |
| Ovarian ca. OVCAR-5 | 72.7 |
| Ovarian ca. OVCAR-8 | 100.0 |
| Ovarian ca. IGROV-1 | 56.3 |
| Ovarian ca. (ascites) SK-OV-3 | 16.4 |
| Uterus | 9.5 |
| Placenta | 39.0 |
| Prostate | 8.8 |
| Prostate ca.* (bone met) PC-3 | 39.0 |
| Testis | 14.0 |
| Melanoma Hs688(A).T | 1.3 |
| Melanoma* (met) Hs688(B).T | 10.6 |
| Melanoma UACC-62 | 48.6 |
| Melanoma M14 | 69.7 |
| Melanoma LOX IMVI | 0.0 |
| Melanoma* (met) SK-MEL-5 | 9.7 |

[0730] TABLE MH
Panel 1.3D

| | Rel. Exp. (%) | Rel. Exp. (%) | Rel. Exp. (%) | Rel. Exp. (%) |
|---|---|---|---|---|
| | Ag1585, | Ag2377, | Ag2607, | Ag2610, |
| | Run | Run | Run | Run |
| Tissue Name | 165529870 | 165631765 | 166219825 | 166162989 |
| Liver adenocarcinoma | 5.1 | 5.6 | 0.0 | 0.0 |
| Pancreas | 0.0 | 0.0 | 0.0 | 0.0 |
| Pancreatic ca. CAPAN 2 | 0.0 | 0.0 | 0.0 | 5.6 |
| Adrenal gland | 0.0 | 0.0 | 0.0 | 0.0 |
| Thyroid | 0.0 | 0.0 | 0.0 | 0.0 |
| Salivary gland | 11.0 | 4.5 | 7.0 | 0.0 |
| Pituitary gland | 0.0 | 0.0 | 7.7 | 28.9 |
| Brain (fetal) | 31.2 | 53.2 | 12.7 | 21.0 |
| Brain (whole) | 56.3 | 48.6 | 100.0 | 100.0 |
| Brain (amygdala) | 15.4 | 0.0 | 31.9 | 0.0 |
| Brain (cerebellum) | 10.0 | 19.6 | 0.0 | 25.2 |
| Brain (hippocampus) | 5.5 | 20.3 | 17.3 | 7.0 |
| Brain (Substantia nigra) | 54.3 | 80.7 | 49.3 | 31.6 |
| Brain (thalamus) | 26.2 | 58.2 | 55.5 | 72.2 |
| Cerebral Cortex | 5.6 | 0.0 | 14.3 | 0.0 |
| Spinal cord | 100.0 | 100.0 | 98.6 | 38.7 |
| glio/astro U87-MG | 13.0 | 0.0 | 0.0 | 0.0 |
| glio/astro U-118-MG | 4.2 | 7.2 | 0.0 | 0.0 |
| astrocytoma SW1783 | 0.0 | 0.0 | 19.9 | 0.0 |
| neuro*; met SK-N-AS | 0.0 | 0.0 | 0.0 | 0.0 |
| astrocytoma SF-539 | 12.3 | 6.5 | 0.0 | 5.4 |
| astrocytoma SNB-75 | 0.0 | 0.0 | 0.0 | 3.9 |
| glioma SNB-19 | 2.1 | 4.0 | 4.5 | 18.2 |
| glioma U251 | 19.3 | 0.0 | 0.0 | 0.0 |
| glioma SF-295 | 23.5 | 0.0 | 0.0 | 0.0 |
| Heart (fetal) | 0.0 | 0.0 | 0.0 | 0.0 |
| Heart | 12.4 | 10.7 | 0.0 | 0.0 |
| Skeletal muscle (fetal) | 0.0 | 0.0 | 0.0 | 0.0 |
| Skeletal muscle | 6.1 | 0.0 | 0.0 | 0.0 |
| Bone marrow | 0.0 | 0.0 | 0.0 | 0.0 |
| Thymus | 0.0 | 0.0 | 0.0 | 0.0 |
| Spleen | 0.0 | 0.0 | 0.0 | 0.0 |
| Lymph node | 6.7 | 0.0 | 0.0 | 0.0 |
| Colorectal | 10.7 | 4.9 | 0.0 | 0.0 |
| Stomach | 0.0 | 0.0 | 0.0 | 7.2 |
| Small intestine | 0.0 | 0.0 | 0.0 | 0.0 |
| Colon ca. SW480 | 0.0 | 0.0 | 0.0 | 5.2 |
| Colon ca.* SW620(SW480 met) | 6.8 | 0.0 | 6.8 | 8.5 |
| Colon ca. HT29 | 0.0 | 0.0 | 0.0 | 0.0 |
| Colon ca. HCT-116 | 5.9 | 0.0 | 0.0 | 0.0 |
| Colon ca. CaCo-2 | 0.0 | 6.6 | 0.0 | 0.0 |
| Colon ca. tissue(ODO3866) | 0.0 | 0.0 | 0.0 | 0.0 |
| Colon ca. HCC-2998 | 0.0 | 0.0 | 0.0 | 0.0 |
| Gastric ca.* (liver met) NCI-N87 | 0.0 | 6.7 | 0.0 | 8.0 |
| Bladder | 2.8 | 0.0 | 9.9 | 17.4 |
| Trachea | 0.0 | 6.4 | 0.0 | 0.0 |
| Kidney | 0.0 | 0.0 | 0.0 | 0.0 |
| Kidney (fetal) | 0.0 | 0.0 | 0.0 | 12.3 |
| Renal ca. 786-0 | 0.0 | 3.4 | 0.0 | 0.0 |
| Renal ca. A498 | 6.9 | 0.0 | 0.0 | 6.1 |
| Renal ca. RXF 393 | 0.0 | 9.5 | 0.0 | 7.9 |
| Renal ca. ACHN | 0.0 | 0.0 | 3.1 | 6.4 |
| Renal ca. UO-31 | 11.0 | 0.0 | 0.0 | 0.0 |
| Renal ca. TK-10 | 4.9 | 0.0 | 0.0 | 0.0 |
| Liver | 8.0 | 0.0 | 0.0 | 0.0 |
| Liver (fetal) | 0.0 | 0.0 | 0.0 | 0.0 |
| Liver ca. (hepatoblast) HepG2 | 0.0 | 0.0 | 0.0 | 0.0 |
| Lung | 11.0 | 0.0 | 0.0 | 0.0 |
| Lung (fetal) | 0.0 | 0.0 | 0.0 | 0.0 |
| Lung ca. (small cell) LX-1 | 3.5 | 14.0 | 7.4 | 0.0 |
| Lung ca. (small cell) NCI-H69 | 0.0 | 0.0 | 0.0 | 0.0 |
| Lung ca. (s. cell var.) SHP-77 | 0.0 | 0.0 | 0.0 | 4.1 |
| Lung ca. (large cell)NCI-H460 | 3.3 | 0.0 | 0.0 | 0.0 |
| Lung ca. (non-sm. cell) A549 | 0.0 | 0.0 | 0.0 | 0.0 |
| Lung ca. (non-s. cell) NCI-H23 | 5.3 | 14.4 | 8.2 | 5.6 |
| Lung ca. (non-s. cell) HOP-62 | 0.0 | 0.0 | 0.0 | 0.0 |
| Lung ca. (non-s. cl) NCI-H522 | 0.0 | 0.0 | 0.0 | 0.0 |
| Lung ca. (squam.) SW 900 | 7.2 | 5.4 | 0.0 | 0.0 |
| Lung ca. (squam.) NCI-H596 | 0.0 | 0.0 | 0.0 | 0.0 |
| Mammary gland | 0.0 | 0.0 | 7.7 | 0.0 |
| Breast ca.* (pl. ef) MCF-7 | 4.7 | 0.0 | 0.0 | 0.0 |
| Breast ca.* (pl. ef) MDA-MB-231 | 0.0 | 0.0 | 0.0 | 6.0 |
| Breast ca.* (pl. ef) T47D | 14.0 | 0.0 | 6.9 | 29.3 |
| Breast ca. BT-549 | 0.0 | 0.0 | 0.0 | 0.0 |
| Breast ca. MDA-N | 5.2 | 12.6 | 18.0 | 0.0 |
| Ovary | 0.0 | 0.0 | 0.0 | 0.0 |
| Ovarian ca. OVCAR-3 | 0.0 | 0.0 | 15.8 | 0.0 |
| Ovarian ca. OVCAR-4 | 0.0 | 0.0 | 0.0 | 5.0 |
| Ovarian ca. OVCAR-5 | 7.7 | 0.0 | 11.7 | 4.5 |
| Ovarian ca. OVCAR-8 | 29.7 | 15.9 | 18.3 | 8.0 |
| Ovarian ca. IGROV-1 | 17.6 | 0.0 | 0.0 | 0.0 |
| Ovarian ca.* (ascites) SK-OV-3 | 0.0 | 0.0 | 0.0 | 6.4 |
| Uterus | 0.0 | 9.5 | 6.1 | 0.0 |
| Placenta | 51.8 | 21.5 | 43.2 | 39.0 |
| Prostate | 0.0 | 14.6 | 0.0 | 0.0 |
| Prostate ca.* (bone met)PC-3 | 0.0 | 0.0 | 6.0 | 0.0 |
| Testis | 17.4 | 14.8 | 18.6 | 10.5 |
| Melanoma Hs688(A).T | 0.0 | 0.0 | 0.0 | 0.0 |
| Melanoma* (met) Hs688(B).T | 0.0 | 0.0 | 0.0 | 0.0 |
| Melanoma UACC-62 | 0.0 | 3.7 | 0.0 | 6.9 |
| Melanoma M14 | 6.4 | 35.6 | 12.1 | 0.0 |
| Melanoma LOX IMVI | 0.0 | 0.0 | 0.0 | 0.0 |
| Melanoma* (met) SK-MEL-5 | 0.0 | 0.0 | 0.0 | 10.4 |
| Adipose | 0.0 | 0.0 | 0.0 | 0.0 |

[0731] TABLE MI
Panel 2.2

| | Rel. Exp. (%) | Rel. Exp. (%) |
|---|---|---|
| | Ag2377, Run | Ag2607, Run |
| Tissue Name | 174553776 | 175128152 |
| Normal Colon | 0.0 | 0.0 |
| Colon cancer (OD06064) | 15.3 | 0.0 |
| Colon Margin (OD06064) | 0.0 | 0.0 |
| Colon cancer (OD06159) | 0.0 | 0.0 |
| Colon Margin (OD06159) | 0.0 | 0.0 |
| Colon cancer (OD06297-04) | 0.0 | 0.0 |
| Colon Margin (OD06297-05) | 0.0 | 0.0 |
| CC Gr.2 ascend colon (ODO3921) | 0.0 | 0.0 |
| CC Margin (ODO3921) | 0.0 | 0.0 |
| Colon cancer metastasis | 0.0 | 0.0 |
| (OD06104) | | |
| Lung Margin (OD06104) | 0.0 | 0.0 |
| Colon mets to lung (OD04451-01) | 27.9 | 0.0 |
| Lung Margin (OD04451-02) | 32.5 | 0.0 |
| Normal Prostate | 0.0 | 0.0 |
| Prostate Cancer (OD04410) | 0.0 | 0.0 |
| Prostate Margin (OD04410) | 0.0 | 0.0 |
| Normal Ovary | 0.0 | 0.0 |
| Ovarian cancer (OD06283-03) | 10.7 | 0.0 |
| Ovarian Margin (OD06283-07) | 0.0 | 0.0 |
| Ovarian Cancer 064008 | 0.0 | 24.1 |
| Ovarian cancer (OD06145) | 0.0 | 0.0 |
| Ovarian Margin (OD06145) | 34.9 | 0.0 |
| Ovarian cancer (OD06455-03) | 24.7 | 0.0 |
| Ovarian Margin (OD06455-07) | 9.9 | 0.0 |
| Normal Lung | 0.0 | 9.2 |
| Invasive poor diff. lung adeno | 12.7 | 0.0 |
| (ODO4945-01 | | |
| Lung Margin (ODO4945-03) | 0.0 | 18.3 |
| Lung Malignant Cancer (OD03126) | 0.0 | 0.0 |
| Lung Margin (OD03126) | 0.0 | 0.0 |
| Lung Cancer (OD05014A) | 0.0 | 0.0 |
| Lung Margin (OD05014B) | 19.5 | 6.0 |
| Lung cancer (OD06081) | 25.9 | 9.3 |
| Lung Margin (OD06081) | 0.0 | 0.0 |
| Lung Cancer (OD04237-01) | 0.0 | 0.0 |
| Lung Margin (OD04237-02) | 0.0 | 11.0 |
| Ocular Melanoma Metastasis | 13.6 | 0.0 |
| Ocular Melanoma Margin (Liver) | 0.0 | 0.0 |
| Melanoma Metastasis | 0.0 | 2.6 |
| Melanoma Margin (Lung) | 0.0 | 0.0 |
| Normal Kidney | 17.9 | 0.0 |
| Kidney Ca, Nuclear grade 2 | 0.0 | 0.0 |
| (OD04338) | | |
| Kidney Margin (OD04338) | 0.0 | 0.0 |
| Kidney Ca Nuclear grade 1/2 | 15.3 | 0.0 |
| (OD04339) | | |
| Kidney Margin (OD04339) | 0.0 | 0.0 |
| Kidney Ca, Clear cell type | 0.0 | 0.0 |
| (OD04340) | | |
| Kidney Margin (OD04340) | 0.0 | 12.2 |
| Kidney Ca, Nuclear grade 3 | 0.0 | 0.0 |
| (OD04348) | | |
| Kidney Margin (OD04348) | 0.0 | 20.7 |
| Kidney malignant cancer | 24.1 | 21.8 |
| (OD06204B) | | |
| Kidney normal adjacent tissue | 0.0 | 0.0 |
| (OD06204E) | | |
| Kidney Cancer (OD04450-01) | 0.0 | 9.5 |
| Kidney Margin (OD04450-03) | 0.0 | 0.0 |
| Kidney Cancer 8120613 | 0.0 | 0.0 |
| Kidney Margin 8120614 | 0.0 | 0.0 |
| Kidney Cancer 9010320 | 0.0 | 0.0 |
| Kidney Margin 9010321 | 0.0 | 0.0 |
| Kidney Cancer 8120607 | 0.0 | 0.0 |
| Kidney Margin 8120608 | 0.0 | 0.0 |
| Normal Uterus | 35.6 | 17.8 |
| Uterine Cancer 064011 | 0.0 | 0.0 |
| Normal Thyroid | 0.0 | 0.0 |
| Thyroid Cancer 064010 | 0.0 | 0.0 |
| Thyroid Cancer A302152 | 0.0 | 0.0 |
| Thyroid Margin A302153 | 0.0 | 0.0 |
| Normal Breast | 15.0 | 8.7 |
| Breast Cancer (OD04566) | 0.0 | 0.0 |
| Breast Cancer 1024 | 84.1 | 36.1 |
| Breast Cancer (OD04590-01) | 0.0 | 0.0 |
| Breast Cancer Mets | 22.5 | 0.0 |
| (OD04590-03) | | |
| Breast Cancer Metastasis | 0.0 | 0.0 |
| (OD04655-05) | | |
| Breast Cancer 064006 | 0.0 | 19.1 |
| Breast Cancer 9100266 | 100.0 | 100.0 |
| Breast Margin 9100265 | 9.9 | 0.0 |
| Breast Cancer A209073 | 0.0 | 0.0 |
| Breast Margin A2090734 | 14.6 | 0.0 |
| Breast cancer (OD06083) | 75.8 | 9.9 |
| Breast cancer node metastasis | 16.6 | 25.3 |
| (OD06083) | | |
| Normal Liver | 0.0 | 0.0 |
| Liver Cancer 1026 | 0.0 | 0.0 |
| Liver Cancer 1025 | 33.4 | 6.7 |
| Liver Cancer 6004-T | 0.0 | 0.0 |
| Liver Tissue 6004-N | 0.0 | 0.0 |
| Liver Cancer 6005-T | 0.0 | 0.0 |
| Liver Tissue 6005-N | 0.0 | 9.7 |
| Liver Cancer 064003 | 0.0 | 0.0 |
| Normal Bladder | 0.0 | 0.0 |
| Bladder Cancer 1023 | 0.0 | 0.0 |
| Bladder Cancer A302173 | 0.0 | 0.0 |
| Normal Stomach | 0.0 | 0.0 |
| Gastric Cancer 9060397 | 0.0 | 0.0 |
| Stomach Margin 9060396 | 0.0 | 7.6 |
| Gastric Cancer 9060395 | 33.2 | 7.6 |
| Stomach Margin 9060394 | 0.0 | 0.0 |
| Gastric Cancer 064005 | 0.0 | 0.0 |

[0732] TABLE MJ
Panel 4D

| | Rel. Exp. (%) | Rel. Exp. (%) |
|---|---|---|
| | Ag2377, Run | Ag2607, Run |
| Tissue Name | 164216614 | 164160833 |
| Secondary Th1 act | 27.4 | 14.3 |
| Secondary Th2 act | 36.3 | 0.0 |
| Secondary Tr1 act | 10.5 | 9.4 |
| Secondary Th1 rest | 0.0 | 0.0 |
| Secondary Th2 rest | 0.0 | 0.0 |
| Secondary Tr1 rest | 12.9 | 0.0 |
| Primary Th1 act | 0.0 | 0.0 |
| Primary Th2 act | 8.1 | 0.0 |
| Primary Tr1 act | 25.3 | 10.3 |
| Primary Th1 rest | 28.1 | 53.2 |
| Primary Th2 rest | 69.3 | 23.3 |
| Primary Tr1 rest | 13.3 | 15.1 |
| CD45RA CD4 lymphocyte act | 0.0 | 0.0 |
| CD45RO CD4 lymphocyte act | 34.4 | 7.3 |
| CD8 lymphocyte act | 8.7 | 9.2 |
| Secondary CD8 lymphocyte rest | 31.0 | 13.1 |
| Secondary CD8 lymphocyte act | 12.2 | 10.8 |
| CD4 lymphocyte none | 0.0 | 0.0 |
| 2ry Th1/Th2/Tr1_anti-CD95 CH11 | 25.9 | 14.6 |
| LAK cells rest | 28.5 | 33.2 |
| LAK cells IL-2 | 0.0 | 9.9 |
| LAK cells IL-2 + IL-12 | 20.0 | 0.0 |
| LAK cells IL-2 + IFN gamma | 12.2 | 10.0 |
| LAK cells IL-2 + IL-18 | 9.4 | 0.0 |
| LAK cells PMA/ionomycin | 18.9 | 0.0 |
| NK Cells IL-2 rest | 25.5 | 17.4 |
| Two Way MLR 3 day | 31.2 | 5.4 |
| Two Way MLR 5 day | 0.0 | 12.0 |
| Two Way MLR 7 day | 10.6 | 0.0 |
| PBMC rest | 11.4 | 5.0 |
| PBMC PWM | 12.2 | 19.5 |
| PBMC PHA-L | 28.1 | 18.6 |
| Ramos (B cell) none | 13.9 | 18.8 |
| Ramos (B cell) ionomycin | 16.6 | 7.8 |
| B lymphocytes PWM | 15.7 | 12.9 |
| B lymphocytes CD40L and IL-4 | 24.8 | 0.0 |
| EOL-1 dbcAMP | 13.7 | 7.4 |
| EOL-1 dbcAMP PMA/ionomycin | 6.2 | 0.0 |
| Dendritic cells none | 15.5 | 29.5 |
| Dendritic cells LPS | 10.7 | 17.0 |
| Dendritic cells anti-CD40 | 11.5 | 5.6 |
| Monocytes rest | 0.0 | 0.0 |
| Monocytes LPS | 100.0 | 50.3 |
| Macrophages rest | 76.8 | 100.0 |
| Macrophages LPS | 8.0 | 8.5 |
| HUVEC none | 9.0 | 0.0 |
| HUVEC starved | 41.8 | 2.8 |
| HUVEC IL-1beta | 0.0 | 0.0 |
| HUVEC IFN gamma | 0.0 | 4.0 |
| HUVEC TNF alpha + IFN | 0.0 | 4.0 |
| gamma | | |
| HUVEC TNF alpha + IL4 | 12.4 | 6.7 |
| HUVEC IL-11 | 12.6 | 0.0 |
| Lung Microvascular EC none | 18.7 | 16.7 |
| Lung Microvascular EC | 0.0 | 12.9 |
| TNFalpha + IL-1beta | | |
| Microvascular Dermal EC none | 35.1 | 4.5 |
| Microsvasular Dermal EC | 8.2 | 10.7 |
| TNFalpha + IL-1beta | | |
| Bronchial epithelium | 0.0 | 0.0 |
| TNFalpha + IL1beta | | |
| Small airway epithelium none | 0.0 | 0.0 |
| Small airway epithelium | 0.0 | 10.7 |
| TNFalpha + IL-1beta | | |
| Coronery artery SMC rest | 12.2 | 0.0 |
| Coronery artery SMC | 0.0 | 0.0 |
| TNFalpha + IL-1beta | | |
| Astrocytes rest | 19.1 | 5.1 |
| Astrocytes TNFalpha + | 8.9 | 0.0 |
| IL-1beta | | |
| KU-812 (Basophil) rest | 0.0 | 0.0 |
| KU-812 (Basophil) | 13.9 | 5.6 |
| PMA/ionomycin | | |
| CCD1106 (Keratinocytes) none | 10.7 | 4.3 |
| CCD1106 (Keratinocytes) | 12.7 | 0.0 |
| TNFalpha + IL-1beta | | |
| Liver cirrhosis | 81.8 | 50.0 |
| Lupus kidney | 23.2 | 8.6 |
| NCI-H292 none | 0.0 | 3.7 |
| NCI-H292 IL-4 | 44.4 | 0.0 |
| NCI-H292 IL-9 | 7.0 | 0.0 |
| NCI-H292 IL-13 | 0.0 | 3.9 |
| NCI-H292 IFN gamma | 11.0 | 1.9 |
| HPAEC none | 6.3 | 11.3 |
| HPAEC TNF alpha + IL-1 | 24.3 | 4.5 |
| beta | | |
| Lung fibroblast none | 0.0 | 0.0 |
| Lung fibroblast | 0.0 | 0.0 |
| TNF alpha + IL-1beta | | |
| Lung fibroblast IL-4 | 0.0 | 0.0 |
| Lung fibroblast IL-9 | 0.0 | 3.3 |
| Lung fibroblast IL-13 | 0.0 | 0.0 |
| Lung fibroblast IFN gamma | 0.0 | 5.1 |
| Dermal fibroblast CCD1070 rest | 2.4 | 15.7 |
| Dermal fibroblast CCD1070 | 66.4 | 10.4 |
| TNF alpha | | |
| Dermal fibroblast CCD1070 | 0.0 | 0.0 |
| IL-1 beta | | |
| Dermal fibroblast IFN gamma | 15.1 | 7.5 |
| Dermal fibroblast IL-4 | 0.0 | 0.0 |
| IBD Colitis 2 | 10.7 | 0.0 |
| IBD Crohn's | 0.0 | 0.0 |
| Colon | 0.0 | 0.0 |
| Lung | 0.0 | 4.5 |
| Thymus | 24.1 | 13.7 |
| Kidney | 44.4 | 17.7 |

[0733] TABLE MK
Panel CNS_1

| | Rel. Exp. (%) | Rel. Exp. (%) |
|---|---|---|
| | Ag2377, Run | Ag2377, Run |
| Tissue Name | 171656285 | 182012511 |
| BA4 Control | 6.1 | 7.4 |
| BA4 Control2 | 8.8 | 4.2 |
| BA4 Alzheimer's2 | 0.0 | 7.1 |
| BA4 Parkinson's | 24.7 | 19.8 |
| BA4 Parkinson's2 | 17.8 | 30.8 |
| BA4 Huntington's | 17.6 | 3.7 |
| BA4 Huntington's2 | 8.1 | 0.0 |
| BA4 PSP | 38.2 | 12.2 |
| BA4 PSP2 | 20.0 | 5.2 |
| BA4 Depression | 49.7 | 31.2 |
| BA4 Depression2 | 14.2 | 18.0 |
| BA7 Control | 23.3 | 2.7 |
| BA7 Control2 | 25.5 | 11.5 |
| BA7 Alzheimer's2 | 18.9 | 4.4 |
| BA7 Parkinson's | 11.4 | 9.8 |
| BA7 Parkinson's2 | 0.0 | 14.6 |
| BA7 Huntington's | 23.7 | 10.9 |
| BA7 Huntington's2 | 42.9 | 26.8 |
| BA7 PSP | 30.8 | 14.6 |
| BA7 PSP2 | 4.2 | 10.4 |
| BA7 Depression | 31.9 | 21.3 |
| BA9 Control | 2.0 | 4.4 |
| BA9 Control2 | 16.7 | 24.7 |
| BA9 Alzheimer's | 0.0 | 6.6 |
| BA9 Alzheimer's2 | 2.9 | 0.0 |
| BA9 Parkinson's | 11.3 | 15.2 |
| BA9 Parkinson's2 | 7.9 | 4.2 |
| BA9 Huntington's | 39.8 | 14.5 |
| BA9 Huntington's2 | 8.1 | 3.7 |
| BA9 PSP | 44.4 | 5.7 |
| BA9 PSP2 | 0.0 | 0.0 |
| BA9 Depression | 15.1 | 5.9 |
| BA9 Depression2 | 14.4 | 8.7 |
| BA17 Control | 47.0 | 30.4 |
| BA17 Control2 | 28.7 | 5.4 |
| BA17 Alzheimer's2 | 7.5 | 7.1 |
| BA17 Parkinson's | 38.2 | 68.3 |
| BA17 Parkinson's2 | 24.0 | 9.3 |
| BA17 Huntington's | 36.1 | 13.8 |
| BA17 Huntington's2 | 15.2 | 16.4 |
| BA17 Depression | 58.6 | 27.7 |
| BA17 Depression2 | 65.5 | 60.3 |
| BA17 PSP | 0.0 | 21.0 |
| BA17 PSP2 | 11.1 | 10.4 |
| Sub Nigra Control | 42.3 | 41.2 |
| Sub Nigra Control2 | 29.5 | 3.6 |
| Sub Nigra Alzheimer's2 | 28.5 | 12.6 |
| Sub Nigra Parkinson's2 | 55.1 | 61.1 |
| Sub Nigra Huntington's | 100.0 | 100.0 |
| Sub Nigra Huntington's2 | 17.3 | 21.2 |
| Sub Nigra PSP2 | 9.7 | 5.4 |
| Sub Nigra Depression | 87.1 | 42.0 |
| Sub Nigra Depression2 | 33.0 | 20.4 |
| Glob Palladus Control | 28.5 | 25.7 |
| Glob Palladus Control2 | 25.2 | 15.2 |
| Glob Palladus Alzheimer's | 11.9 | 16.4 |
| Glob Palladus Alzheimer's2 | 4.2 | 36.9 |
| Glob Palladus Parkinson's | 37.9 | 44.4 |
| Glob Palladus Parkinson's2 | 9.0 | 26.1 |
| Glob Palladus PSP | 48.0 | 33.4 |
| Glob Palladus PSP2 | 10.7 | 9.9 |
| Glob Palladus Depression | 40.9 | 39.5 |
| Temp Pole Control | 0.0 | 0.0 |
| Temp Pole Control2 | 11.8 | 7.9 |
| Temp Pole Alzheimer's | 0.0 | 0.0 |
| Temp Pole Alzheimer's2 | 0.0 | 3.4 |
| Temp Pole Parkinson's | 17.3 | 7.1 |
| Temp Pole Parkinson's2 | 0.0 | 9.5 |
| Temp Pole Huntington's | 0.0 | 4.9 |
| Temp Pole PSP | 6.7 | 6.3 |
| Temp Pole PSP2 | 0.0 | 0.0 |
| Temp Pole Depression2 | 0.0 | 23.8 |
| Cing Gyr Control | 31.2 | 27.4 |
| Cing Gyr Control2 | 16.8 | 24.5 |
| Cing Gyr Alzheimer's | 17.8 | 13.2 |
| Cing Gyr Alzheimer's2 | 13.9 | 3.4 |
| Cing Gyr Parkinson's | 26.2 | 30.8 |
| Cing Gyr Parkinson's2 | 24.8 | 25.9 |
| Cing Gyr Huntington's | 30.8 | 28.7 |
| Cing Gyr Huntington's2 | 20.7 | 14.2 |
| Cing Gyr PSP | 90.1 | 76.3 |
| Cing Gyr PSP2 | 0.0 | 20.3 |
| Cing Gyr Depression | 52.5 | 61.1 |
| Cing Gyr Depression2 | 43.5 | 15.3 |

[0734] TABLE ML
Panel CNS_1.1

| | Rel. Exp. (%) | Rel. Exp. (%) |
|---|---|---|
| | Ag2377, Run | Ag2377, Run |
| Tissue Name | 200060897 | 200061715 |
| Cing Gyr Depression2 | 39.2 | 13.9 |
| Cing Gyr Depression | 35.8 | 23.2 |
| Cing Gyr PSP2 | 6.2 | 2.8 |
| Cing Gyr PSP | 100.0 | 100.0 |
| Cing Gyr Huntington's2 | 32.5 | 10.4 |
| Cing Gyr Huntington's | 27.4 | 8.8 |
| Cing Gyr Parkinson's2 | 12.8 | 1.9 |
| Cing Gyr Parkinson's | 47.6 | 32.5 |
| Cing Gyr Alzheimer's2 | 0.0 | 7.2 |
| Cing Gyr Alzheimer's | 13.8 | 3.6 |
| Cing Gyr Control2 | 77.9 | 1.4 |
| Cing Gyr Control | 30.1 | 11.7 |
| Temp Pole Depression2 | 0.0 | 14.8 |
| Temp Pole PSP2 | 0.0 | 4.5 |
| Temp Pole PSP | 5.5 | 3.3 |
| Temp Pole Huntington's | 0.0 | 7.7 |
| Temp Pole Parkinson's2 | 0.0 | 0.0 |
| Temp Pole Parkinson's | 27.5 | 4.9 |
| Temp Pole Alzheimer's2 | 0.0 | 0.0 |
| Temp Pole Alzheimer's | 0.0 | 0.0 |
| Temp Pole Control2 | 21.3 | 8.4 |
| Temp Pole Control | 0.0 | 0.0 |
| Glob Palladus Depression | 35.8 | 16.4 |
| Glob Palladus PSP2 | 5.5 | 5.0 |
| Glob Palladus PSP | 23.7 | 8.6 |
| Glob Palladus Parkinson's2 | 34.2 | 6.5 |
| Glob Palladus Parkinson's | 16.4 | 20.3 |
| Glob Palladus Alzheimer's2 | 19.5 | 3.4 |
| Glob Palladus Alzheimer's | 24.3 | 6.7 |
| Glob Palladus Control2 | 13.8 | 2.8 |
| Glob Palladus Control | 33.2 | 17.7 |
| Sub Nigra Depression2 | 36.3 | 5.5 |
| Sub Nigra Depression | 52.5 | 10.4 |
| Sub Nigra PSP2 | 12.4 | 15.9 |
| Sub Nigra Huntington's2 | 8.7 | 5.9 |
| Sub Nigra Huntington's | 82.4 | 51.1 |
| Sub Nigra Parkinson's2 | 34.9 | 12.5 |
| Sub Nigra Alzheimer's2 | 34.2 | 15.0 |
| Sub Nigra Control2 | 6.3 | 5.3 |
| Sub Nigra Control | 58.6 | 10.2 |
| BA17 Depression2 | 39.2 | 9.3 |
| BA17 Depression | 43.5 | 50.7 |
| BA17 PSP2 | 5.3 | 11.8 |
| BA17 PSP | 4.2 | 13.1 |
| BA17 Huntington's2 | 17.8 | 10.1 |
| BA17 Huntington's | 36.9 | 6.9 |
| BA17 Parkinson's2 | 19.2 | 12.2 |
| BA17 Parkinson's | 37.4 | 19.1 |
| BA17 Alzheimer's2 | 7.7 | 0.0 |
| BA17 Control2 | 35.8 | 20.0 |
| BA17 Control | 35.1 | 22.7 |
| BA9 Depression2 | 8.6 | 3.8 |
| BA9 Depression | 0.0 | 14.1 |
| BA9 PSP2 | 3.6 | 12.4 |
| BA9 PSP | 48.6 | 18.3 |
| BA9 Huntington's2 | 6.9 | 5.0 |
| BA9 Huntington's | 59.0 | 8.4 |
| BA9 Parkinson's2 | 0.0 | 2.5 |
| BA9 Parkinson's | 7.9 | 0.0 |
| BA9 Alzheimer's2 | 0.0 | 0.0 |
| BA9 Alzheimer's | 0.0 | 0.0 |
| BA9 Control2 | 26.4 | 12.2 |
| BA9 Control | 15.1 | 0.0 |
| BA7 Depression | 29.3 | 11.1 |
| BA7 PSP2 | 28.7 | 2.9 |
| BA7 PSP | 7.0 | 6.6 |
| BA7 Huntington's2 | 18.6 | 23.7 |
| BA7 Huntington's | 11.3 | 6.7 |
| BA7 Parkinson's2 | 0.0 | 0.0 |
| BA7 Parkinson's | 9.5 | 1.2 |
| BA7 Alzheimer's2 | 19.6 | 0.0 |
| BA7 Control2 | 25.3 | 2.4 |
| BA7 Control | 10.1 | 9.6 |
| BA4 Depression2 | 27.5 | 15.9 |
| BA4 Depression | 10.8 | 15.6 |
| BA4 PSP2 | 15.2 | 17.0 |
| BA4 PSP | 11.3 | 10.7 |
| BA4 Huntington's2 | 0.0 | 0.0 |
| BA4 Huntington's | 0.0 | 3.8 |
| BA4 Parkinson's2 | 18.7 | 11.7 |
| BA4 Parkinson's | 54.0 | 3.2 |
| BA4 Alzheimer's2 | 6.2 | 0.0 |
| BA4 Control2 | 0.0 | 4.2 |
| BA4 Control | 35.6 | 4.7 |

[0735] CNS_neurodegeneration_v1.0 Summary: Ag2610/Ag2607/Ag2377 The CG50303-03 gene is expressed more highly in the temporal cortex of Alzheimer's diseased brain than in control brain without amyloid plaques, which are diagnostic and potentially causative of Alzheimer's disease. The CG50303-03 gene encodes a protein with homology to GPCRs. GPCRs are readily targetable with drugs, and regulate many specific brain processes, including signaling processes, that are currently the target of FDA-approved pharmaceuticals that treat Alzheimer's disease, such as the cholinergic system. The major mechanisms proposed for AbetaP-induced cytotoxicity involve the loss of Ca2+ homeostasis and the generation of reactive oxygen species (ROS). The changes in Ca2+ homeostasis could be the result of changes in G-protein-driven releases of second messengers. Thus, targeting this class of molecule can have therapeutic potential in Alzheimer's disease treatment. In particular, the increased CG50303-03 gene expression in brains affected by Alzheimer's indicates potential therapeutic value to drugs that target this GPCR.

[0736] See Perrine K, Dogali M, Fazzini E, Sterio D, Kolodny E, Eidelberg D, Devinsky O, Beric A.Cognitive functioning after pallidotomy for refractory Parkinson's disease. J Neurol Neurosurg Psychiatry 1998 Aug;65(2):150-4. PMID: 9703163; and Kourie J I. Mechanisms of amyloid beta protein-induced modification in ion transport systems: implications for neurodegenerative diseases. Cell Mol Neurobiol 2001 June; 21(3):173-213 PMID: 11569534.

[0737] Panel 1.2 Summary: Ag1501 The CG50303-03 gene is expressed at moderate levels throughout many of the samples in this panel. Highest expression is detected in an ovarian cancer cell line (CT=30.7). In addition, this gene is overexpressed in all six ovarian cancer cell lines present in this panel when compared to expression in normal ovary. The CG50303-03 gene is also moderately expressed in cell lines derived from melanoma, breast cancer, and lung cancer. Thus, the expression of this gene could be used to distinguish these cell lines from other tissue samples. In addition, therapeutic modulation of the CG50303-03 gene or its protein product, through the use of small molecule drugs or antibodies, might be useful in the treatment of ovarian cancer, breast cancer, lung cancer or melanoma.

[0738] Among tissues involved in metabolic function, the CG50303-03 gene is moderately expressed in the adrenal gland, heart, skeletal muscle, and adult liver. Interestingly, CG50303-03 gene expression is much lower in fetal liver and heart tissues than in the corresponding adult tissues. Thus, expression of the CG50303-03 gene could be used to differentiate between adult and fetal tissues derived from the heart and liver. Furthermore, this gene or its protein product may be important in the pathogenesis and/or treatment of disease in any or all of the above-named tissues.

[0739] There is widespread moderate expression of the CG50303-03 gene across many of the samples derived from the CNS, including the amygdala, cerebellum, hippocampus, thalamus, cerebral cortex, and spinal cord. Please see CNS_neurodegeneration panel_v1.0 summary for description of the potential role of this gene in the treatment of CNS disorders.

[0740] Panel 1.3D Summary: Ag2610/Ag2607/Ag1585/Ag2377 Expression of the CG50303-03 gene appears to be limited to tissues involved in central nervous system function on this panel. Specifically, low but significant expression is detected in the thalamus, substantia nigra, spinal cord and fetal brain.

[0741] Panel 2.2 Summary: Ag2377/Ag2607 Expression of the CG50303-03 gene is highest in a sample derived from a breast cancer sample (CTs=34-34.7). Thus, the expression of this gene could be used to distinguish breast cancer samples from other samples and as a diagnostic marker for the presence of breast cancer. Furthermore, therapeutic modulation of the CG50303-03 gene or the activity of its protein product, through the use of small molecule drugs or antibodies, might be effective in the treatment of breast cancer. Ag2610/Ag1585 Expression of the CG50303-03 gene is low/undetectable (Ct values>35) in all samples on this panel.

[0742] Panel 4D Summary: Ag2607/Ag2377 Two experiments with two different probe and primer sets show the CG50303-03 gene is up regulated in LPS-stimulated monocytes (CTw=32-34). The putative GPCR encoded by this gene may therefore be involved in the activation of monocytes in their function as antigen-presenting cells. This suggests that antibodies or small molecule therapeutics that block the function of this membrane protein may be useful as anti-inflammatory therapeutics for the treatment of autoimmune and inflammatory diseases. Furthermore, antibodies or small molecule therapeutics that stimulate the function of this GPCR may be useful therapeutics for the treatment of immunosupressed individuals. Please note that data from one experiment with probe and primer set Ag2610 showed low/undetectable expression in all the samples on this panel (CTs>35).

[0743] Panel CNS_{—}1 Summary: Ag2377 Two experiments with the same probe and primer set produce results that are in very good agreement. Expression of the CG50303-03 gene is highest in the substantia nigra of a Huntington's disease patient, indicating that this gene may participate in the genetic dysregulation associated with the neurodegeneration that occurs in this brain region. The substantia nigra is also critical to the progression of Parkinson's disease neurodegeneration. Thus, pharmacological targeting of the GPCR encoded by the CG50303-03 gene may help counter this genetic dysregulation and contribute to the restoration of normal function in Huntington's disease as well as potentially Parkinson's disease patients. Pharmacological modulation of GPCR signaling systems is the mechanism by which powerful depression therapies, such as SSRIs, exert their effect. Please note that a third experiment with the probe and primer set Ag1585 showed low/undetectable expression in all the samples on this panel (CTs>35).

[0744] Panel CNS_{—}1.1 Summary: Ag2377 In two experiments using the same probe and primer, highest expression of the CG50303-03 gene is seen in the cingulate gyrus of patients with para supranuclear palsy PSP (CTs=32) and depression. This observation indicates that targeting this GPCR could have therapeutic value in the treatment of these diseases.

[0745] N. CG54092-01: Tandem Acid-Sensitive Potassium Channel Task5.

[0746] Expression of gene CG54092-01 was assessed using the primer-probe sets Ag241 and Ag3074, described in Tables NA and NB. Results of the RTQ-PCR runs are shown in Tables NC, ND, NE, NF, NG, NH and NI.

TABLE NA
Probe Name Ag241

| | | | Start | SEQ ID |
|---|---|---|---|---|
| Primers | Sequences | Length | Position | No |
| Forward | 5′-cagggtcgaatctggaatgg-3′ | 20 | 1009 | 190 |
| Probe | TET-5′-tctggcttcagctatcagggcaccc-3′-TAMRA | 25 | 1034 | 191 |
| Reverse | 5′-cccgtcatccgtttccaat-3′ | 19 | 1068 | 192 |

[0747] TABLE NB
Probe Name Ag3074

| | | | Start | SEQ |
|---|---|---|---|---|
| Primers | Sequences | Length | Position | ID No |
| Forward | 5′-gctccttctacttcgccatc-3′ | 20 | 245 | 193 |
| Probe | TET-5′-tcatcactaccatcgagtacgqccac-3′-TAMRA | 26 | 269 | 194 |
| Reverse | 5′-acatgcagaagaccttgcc-3′ | 19 | 316 | 195 |

[0748] TABLE NC
AI.05 chondrosarcoma

| | Rel. |
|---|---|
| | Exp.(%) |
| | Ag3074, |
| | Run |
| Tissue Name | 306941363 |
| 138353_PMA (18 hrs) | 18.0 |
| 138352_IL-1beta + Oncostatin M | 82.9 |
| (18 hrs) | |
| 138351_IL-1beta + TNFa(18 hrs) | 38.2 |
| 138350_IL-1beta (18 hrs) | 51.4 |
| 138354_Untreated-complete | 17.6 |
| medium (18 hrs) | |
| 138347_PMA (6 hrs) | 41.8 |
| 138346_IL-1beta + Oncostatin M | 100.0 |
| (6 hrs) | |
| 138345_IL-1beta + TNFa (6 hrs) | 13.4 |
| 138344 IL-lbeta(6 hrs) | 118.0 |
| 138349_Untreated-serum starved | 53.2 |
| (6 hrs) | |
| 138348_Untreated-complete | 17.1 |
| medium (6 hrs) | |

[0749] TABLE ND
AI_comprehensive panel_v1.0

| | Rel. Exp. (%) |
|---|---|
| | Ag3074, |
| | Run |
| Tissue Name | 248429496 |
| 110967 COPD-F | 18.9 |
| 110980 COPD-F | 27.9 |
| 110968 COPD-M | 12.5 |
| 110977 COPD-M | 48.0 |
| 110989 Emphysema-F | 29.1 |
| 110992 Emphysema-F | 26.2 |
| 110993 Emphysema-F | 25.9 |
| 110994 Emphysema-F | 10.4 |
| 110995 Emphysema-F | 17.4 |
| 110996 Emphysema-F | 4.8 |
| 110997 Asthma-M | 9.0 |
| 111001 Asthma-F | 24.7 |
| 111002 Asthma-F | 39.5 |
| 111003 Atopic Asthma-F | 59.9 |
| 111004 Atopic Asthma-F | 88.9 |
| 111005 Atopic Asthma-F | 51.8 |
| 111006 Atopic Asthma-F | 13.5 |
| 111417 Allergy-M | 73.2 |
| 112347 Allergy-M | 0.0 |
| 112349 Normal Lung-F | 1.0 |
| 112357 Normal Lung-F | 21.6 |
| 112354 Normal Lung-M | 33.4 |
| 112374 Crohns-F | 5.7 |
| 112389 Match Control Crohns-F | 4.9 |
| 112375 Crohns-F | 3.0 |
| 112732 Match Control Crohns-F | 0.0 |
| 112725 Crohns-M | 1.7 |
| 112387 Match Control Crohns-M | 18.9 |
| 112378 Crohns-M | 0.0 |
| 112390 Match Control Crohns-M | 21.6 |
| 112726 Crohns-M | 70.2 |
| 112731 Match Control Crohns-M | 13.6 |
| 112380 Ulcer Col-F | 27.2 |
| 112734 Match Control Ulcer Col-F | 7.4 |
| 112384 Ulcer Col-F | 22.8 |
| 112737 Match Control Ulcer Col-F | 23.8 |
| 112386 Ulcer Col-F | 5.0 |
| 112738 Match Control Ulcer Col-F | 2.3 |
| 112381 Ulcer Col-M | 3.0 |
| 112735 Match Control Ulcer Col-M | 1.5 |
| 112382 Ulcer Col-M | 11.2 |
| 112394 Match Control Ulcer Col-M | 3.5 |
| 112383 Ulcer Col-M | 34.9 |
| 112736 Match Control Ulcer Col-M | 6.1 |
| 112423 Psoriasis-F | 6.6 |
| 112427 Match Control Psoriasis-F | 36.1 |
| 112418 Psoriasis-M | 24.3 |
| 112723 Match Control Psoriasis-M | 27.0 |
| 112419 Psoriasis-M | 23.3 |
| 112424 Match Control Psoriasis-M | 7.0 |
| 112420 Psoriasis-M | 47.0 |
| 112425 Match Control Psoriasis-M | 47.6 |
| 104689 (MF) OA Bone-Backus | 10.7 |
| 104690 (MF) Adj “Normal” Bone-Backus | 18.0 |
| 104691 (MF) OA Synovium-Backus | 34.6 |
| 104692 (BA) OA Cartilage-Backus | 3.0 |
| 104694 (BA) OA Bone-Backus | 36.3 |
| 104695 (BA) Adj “Normal” Bone-Backus | 26.4 |
| 104696 (BA) OA Synovium-Backus | 100.0 |
| 104700 (SS) OA Bone-Backus | 6.9 |
| 104701 (SS) Adj “Normal” Bone-Backus | 18.2 |
| 104702 (SS) OA Synovium-Backus | 41.2 |
| 117093 OA Cartilage Rep7 | 37.9 |
| 112672 OA Bone5 | 63.7 |
| 112673 OA Synovium5 | 25.5 |
| 112674 OA Synovial Fluid cells5 | 30.6 |
| 117100 OA Cartilage Rep14 | 23.0 |
| 112756 OA Bone9 | 1.7 |
| 112757 OA Synovium9 | 0.0 |
| 112758 OA Synovial Fluid Cells9 | 4.8 |
| 117125 RA Cartilage Rep2 | 22.1 |
| 113492 Bone2 RA | 3.3 |
| 113493 Synovium2 RA | 0.0 |
| 113494 Syn Fluid Cells RA | 10.8 |
| 113499 Cartilage4 RA | 10.4 |
| 113500 Bone4 RA | 0.0 |
| 113501 Synovium4 RA | 3.3 |
| 113502 Syn Fluid Cells4 RA | 2.9 |
| 113495 Cartilage3 RA | 2.9 |
| 113496 Bone3 RA | 9.7 |
| 113497 Synovium3 RA | 1.2 |
| 113498 Syn Fluid Cells3 RA | 6.7 |
| 117106 Normal Cartilage Rep20 | 18.0 |
| 113663 Bone3 Normal | 0.0 |
| 113664 Synovium3 Normal | 0.0 |
| 113665 Syn Fluid Cells3 Normal | 0.0 |
| 117107 Normal Cartilage Rep22 | 4.6 |
| 113667 Bone4 Normal | 8.8 |
| 113668 Synovium4 Normal | 5.5 |
| 113669 Syn Fluid Cells4 Normal | 9.2 |

[0750] TABLE NE
Panel 1.3D

| | Rel. Exp. (%) | Rel. Exp. (%) | Rel. Exp. (%) |
|---|---|---|---|
| | Ag241, Run | Ag241, Run | Ag3074, Run |
| Tissue Name | 155695586 | 163728044 | 163724451 |
| Liver | 0.3 | 1.7 | 6.9 |
| adenocarcinoma | | | |
| Pancreas | 0.5 | 1.2 | 0.6 |
| Pancreatic ca. | 0.4 | 0.0 | 0.0 |
| CAPAN 2 | | | |
| Adrenal gland | 1.4 | 1.3 | 0.6 |
| Thyroid | 4.1 | 4.4 | 19.8 |
| Salivary gland | 1.0 | 0.1 | 1.3 |
| Pituitary gland | 2.9 | 2.0 | 0.6 |
| Brain (fetal) | 0.3 | 0.0 | 0.0 |
| Brain (whole) | 0.1 | 0.3 | 0.9 |
| Brain | 0.4 | 0.1 | 0.0 |
| (amygdala) | | | |
| Brain | 0.0 | 0.0 | 0.0 |
| (cerebellum) | | | |
| Brain | 1.3 | 0.0 | 0.0 |
| (hippocampus) | | | |
| Brain | 0.2 | 0.0 | 0.4 |
| (substantia | | | |
| nigra) | | | |
| Brain | 0.2 | 0.0 | 1.2 |
| (thalamus) | | | |
| Cerebral Cortex | 0.1 | 2.3 | 1.5 |
| Spinal cord | 0.6 | 0.9 | 0.7 |
| glio/astro | 0.2 | 0.4 | 0.6 |
| U87-MG | | | |
| glio/astro | 7.8 | 2.9 | 4.3 |
| U-118-MG | | | |
| astrocytoma | 0.0 | 0.0 | 0.0 |
| SW1783 | | | |
| neuro*; met | 0.6 | 0.0 | 0.0 |
| SK-N-AS | | | |
| astrocytoma | 0.1 | 0.6 | 0.0 |
| SF-539 | | | |
| astrocytoma | 2.3 | 0.6 | 0.0 |
| SNB-75 | | | |
| glioma SNB-19 | 0.0 | 0.5 | 0.7 |
| glioma U251 | 0.0 | 0.3 | 0.0 |
| glioma SF-295 | 0.2 | 0.4 | 0.6 |
| Heart (fetal) | 0.6 | 0.0 | 0.3 |
| Heart | 0.2 | 1.5 | 6.5 |
| Skeletal muscle | 1.4 | 2.6 | 1.7 |
| (fetal) | | | |
| Skeletal muscle | 0-5 | 0.4 | 0.0 |
| Bone marrow | 0.0 | 0.0 | 0.0 |
| Thymus | 0.0 | 0.8 | 2.2 |
| Spleen | 0.0 | 0.0 | 0.7 |
| Lymph node | 0.4 | 0.0 | 0.0 |
| Colorectal | 0.9 | 0.4 | 1.0 |
| Stomach | 1.5 | 0.7 | 0.7 |
| Small intestine | 0.4 | 0.3 | 0.3 |
| Colon ca. | 1.3 | 0.6 | 0.6 |
| SW480 | | | |
| Colon ca.* | 0.2 | 1.3 | 0.0 |
| SW620(SW480 met) | | | |
| Colon ca. HT29 | 0.0 | 0.0 | 0.0 |
| Colon ca. | 0.0 | 0.0 | 0.0 |
| HCT-116 | | | |
| Colon ca. | 3.0 | 4.7 | 2.4 |
| CaCo-2 | | | |
| Colon ca. | 1.5 | 3.0 | 5.4 |
| tissue(ODO3866) | | | |
| Colon ca. | 2.4 | 1.6 | 1.0 |
| HCC-2998 | | | |
| Gastric ca.* | 100.0 | 100.0 | 100.0 |
| (liver met) | | | |
| NCI-N87 | | | |
| Bladder | 3.0 | 5.8 | 12.9 |
| Trachea | 4.4 | 3.1 | 9.0 |
| Kidney | 0.1 | 0.4 | 1.6 |
| Kidney (fetal) | 1.0 | 0.0 | 0.4 |
| Renal ca. | 0.0 | 0.0 | 0.0 |
| 786-0 | | | |
| Renal ca. | 0.4 | 0.0 | 0.0 |
| A498 | | | |
| Renal ca. | 0.1 | 0.4 | 2.1 |
| RXF 393 | | | |
| Renal ca. | 14.0 | 23.5 | 28.7 |
| ACHN | | | |
| Renal ca. | 0.0 | 0.0 | 0.0 |
| UO-31 | | | |
| Renal ca. | 0.0 | 0.0 | 0.0 |
| TK-10 | | | |
| Liver | 0.0 | 0.0 | 0.0 |
| Liver (fetal) | 0.0 | 0.0 | 0.0 |
| Liver ca. | 0.0 | 0.0 | 0.0 |
| (hepatoblast) HepG2 | | | |
| Lung | 3.8 | 0.7 | 1.4 |
| Lung (fetal) | 0.0 | 0.4 | 0.3 |
| Lung ca. | 0.2 | 0.0 | 0.9 |
| (small cell) | | | |
| LX-1 | | | |
| Lung ca. | 2.7 | 1.4 | 0.3 |
| (small cell) | | | |
| NCI-H69 | | | |
| Lung ca. | 0.0 | 0.0 | 0.0 |
| (s. cell var.) | | | |
| SHP-77 | | | |
| Lung ca. | 0.2 | 0.6 | 0.0 |
| (large cell)NCI- | | | |
| H460 | | | |
| Lung ca. | 4.1 | 1.2 | 2.5 |
| (non-sm. cell) | | | |
| A549 | | | |
| Lung ca. | 39.0 | 50.0 | 45.1 |
| (non-s. cell) | | | |
| NCI-H23 | | | |
| Lung ca. | 0.2 | 0.0 | 0.0 |
| (non-s. cell) | | | |
| HOP-62 | | | |
| Lung ca. | 0.2 | 0.4 | 0.3 |
| (non-s. cl) | | | |
| NCI-H522 | | | |
| Lung ca. | 0.8 | 1.1 | 0.0 |
| (squam.) SW | | | |
| 900 | | | |
| Lung ca. | 0.1 | 0.9 | 1.0 |
| (squam.) | | | |
| NCI-H596 | | | |
| Mammary gland | 3.0 | 1.6 | 0.4 |
| Breast ca.* | 43.5 | 73.2 | 43.8 |
| (pl. ef) MCF-7 | | | |
| Breast ca.* | 0.0 | 0.0 | 0.0 |
| (pl. ef) | | | |
| MDA-MB-231 | | | |
| Breast ca.* | 9.2 | 9.2 | 24.0 |
| (pl. ef) T47D | | | |
| Breast ca. | 0.8 | 0.0 | 0.4 |
| BT-549 | | | |
| Breast ca. | 0.1 | 0.0 | 0.0 |
| MDA-N | | | |
| Ovary | 3.3 | 6.5 | 11.0 |
| Ovarian ca. | 11.6 | 18.7 | 19.1 |
| OVCAR-3 | | | |
| Ovarian ca. | 10.4 | 5.7 | 9.0 |
| OVCAR-4 | | | |
| Ovarian ca. | 1.3 | 2.3 | 3.4 |
| OVCAR-5 | | | |
| Ovarian ca. | 7.9 | 9.3 | 12.8 |
| OVCAR-8 | | | |
| Ovarian ca. | 0.1 | 0.0 | 0.0 |
| IGROV-1 | | | |
| Ovarian ca.* | 3.8 | 2.8 | 5.1 |
| (ascites) | | | |
| SK-OV-3 | | | |
| Uterus | 2.1 | 1.3 | 3.9 |
| Placenta | 0.0 | 0.7 | 0.5 |
| Prostate | 0.6 | 0.4 | 7.2 |
| Prostate ca.* | 17.3 | 21.3 | 33.9 |
| (bone | | | |
| met)PC-3 | | | |
| Testis | 7.1 | 3.2 | 9.2 |
| Melanoma | 0.0 | 0.0 | 0.0 |
| Hs688(A).T | | | |
| Melanoma* | 0.0 | 0.0 | 1.4 |
| (met) | | | |
| Hs688(B).T | | | |
| Melanoma | 0.0 | 0.5 | 0.0 |
| UACC-62 | | | |
| Melanoma | 0.0 | 0.0 | 0.4 |
| M14 | | | |
| Melanoma | 0.0 | 0.0 | 0.0 |
| LOX IMVI | | | |
| Melanoma* | 0.0 | 0.0 | 0.0 |
| (met) | | | |
| SK-MEL-5 | | | |
| Adipose | 2.3 | 2.2 | 2.6 |

[0751] TABLE NF
Panel 2D

| | Rel. Exp. (%) | Rel. Exp. (%) | Rel. Exp. (%) |
|---|---|---|---|
| | Ag241, Run | Ag241, Run | Ag3074, Run |
| Tissue Name | 155695603 | 163578011 | 163578433 |
| Normal Colon | 3.7 | 6.9 | 2.1 |
| CC Well to | 6.0 | 6.3 | 1.9 |
| Mod Diff | | | |
| (ODO3866) | | | |
| CC Margin | 0.7 | 0.0 | 0.9 |
| (ODO3866) | | | |
| CC Gr.2 | 0.0 | 0.0 | 0.0 |
| rectosigmoid | | | |
| (ODO3868) | | | |
| CC Margin | 0.0 | 0.0 | 0.0 |
| (ODO3868) | | | |
| CC Mod Diff | 0.0 | 0.0 | 0.0 |
| (ODO3920) | | | |
| CC Margin | 0.0 | 0.8 | 0.0 |
| (ODO3920) | | | |
| CC Gr.2 | 18.7 | 14.1 | 7.1 |
| ascend colon | | | |
| (ODO3921) | | | |
| CC Margin | 1.1 | 0.6 | 1.3 |
| (ODO3921) | | | |
| CC from | 0.4 | 3.8 | 0.6 |
| Partial | | | |
| Hepatectomy | | | |
| (ODO4309) | | | |
| Mets | | | |
| Liver Margin | 0.0 | 0.0 | 0.0 |
| (ODO4309) | | | |
| Colon mets | 1.0 | 3.5 | 0.0 |
| to lung | | | |
| (OD04451-01) | | | |
| Lung Margin | 2.4 | 1.6 | 0.3 |
| (OD04451-02) | | | |
| Normal | 3.1 | 15.8 | 10.8 |
| Prostate | | | |
| 6546-1 | | | |
| Prostate | 0.7 | 2.0 | 2.1 |
| Cancer | | | |
| (OD04410) | | | |
| Prostate | 3.5 | 2.2 | 1.2 |
| Margin | | | |
| (OD04410) | | | |
| Prostate | 1.6 | 1.4 | 1.4 |
| Cancer | | | |
| (OD04720-01) | | | |
| Prostate | 5.3 | 5.8 | 6.5 |
| Margin | | | |
| (OD04720-02) | | | |
| Normal Lung | 2.3 | 3.1 | 2.0 |
| 061010 | | | |
| Lung Met | 1.7 | 1.2 | 0.2 |
| to Muscle | | | |
| (ODO4286) | | | |
| Muscle | 5.6 | 3.5 | 5.2 |
| Margin | | | |
| (ODO4286) | | | |
| Lung | 12.8 | 8.8 | 13.9 |
| Malignant | | | |
| Cancer | | | |
| (OD03126) | | | |
| Lung Margin | 2.0 | 2.9 | 2.9 |
| (OD03126) | | | |
| Lung Cancer | 3.1 | 2.0 | 2.7 |
| (OD04404) | | | |
| Lung Margin | 11.0 | 9.6 | 4.3 |
| (OD04404) | | | |
| Lung Cancer | 0.0 | 0.0 | 0.0 |
| (OD04565) | | | |
| Lung Margin | 2.4 | 1.7 | 0.5 |
| (OD04565) | | | |
| Lung Cancer | 0.0 | 0.0 | 1.4 |
| (OD04237-01) | | | |
| Lung Margin | 5.4 | 5.6 | 2.7 |
| (OD04237-02) | | | |
| Ocular Mel | 3.1 | 0.9 | 0.7 |
| Met to Liver | | | |
| (ODO4310) | | | |
| Liver Margin | 0.0 | 0.0 | 0.8 |
| (ODO4310) | | | |
| Melanoma | 12.9 | 12.9 | 13.9 |
| Mets to Lung | | | |
| (OD04321) | | | |
| Lung Margin | 7.5 | 8.4 | 8.8 |
| (OD04321) | | | |
| Normal | 2.3 | 0.0 | 1.1 |
| Kidney | | | |
| Kidney Ca, | 2.4 | 6.0 | 1.5 |
| Nuclear | | | |
| grade 2 | | | |
| (OD04338) | | | |
| Kidney | 2.3 | 2.9 | 1.5 |
| Margin | | | |
| (OD04338) | | | |
| Kidney Ca | 2.5 | 7.3 | 0.8 |
| Nuclear | | | |
| grade 1/2 | | | |
| (OD04339) | | | |
| Kidney | 1.6 | 3.9 | 1.4 |
| Margin | | | |
| (OD04339) | | | |
| Kidney Ca, | 0.9 | 0.0 | 0.2 |
| Clear cell | | | |
| type | | | |
| (OD04340) | | | |
| Kidney | 4.6 | 3.7 | 1.7 |
| Margin | | | |
| (OD04340) | | | |
| Kidney Ca, | 0.0 | 0.2 | 1.1 |
| Nuclear | | | |
| grade 3 | | | |
| (OD04348) | | | |
| Kidney | 2.2 | 0.7 | 2.4 |
| Margin | | | |
| (OD04348) | | | |
| Kidney | 0.0 | 0.7 | 0.1 |
| Cancer | | | |
| (OD04622-01) | | | |
| Kidney | 5.6 | 5.8 | 4.7 |
| Margin | | | |
| (OD04622-03) | | | |
| Kidney | 27.0 | 16.3 | 9.0 |
| Cancer | | | |
| (OD04450-01) | | | |
| Kidney | 0.0 | 1.0 | 1.4 |
| Margin | | | |
| (OD04450-03) | | | |
| Kidney | 0.6 | 1.7 | 2.2 |
| Cancer | | | |
| 8120607 | | | |
| Kidney | 1.3 | 1.2 | 2.3 |
| Margin | | | |
| 8120608 | | | |
| Kidney | 0.0 | 0.0 | 0.0 |
| Cancer | | | |
| 8120613 | | | |
| Kidney | 3.2 | 0.0 | 1.7 |
| Margin | | | |
| 8120614 | | | |
| Kidney | 5.1 | 3.3 | 2.9 |
| Cancer | | | |
| 9010320 | | | |
| Kidney | 6.2 | 2.6 | 3.6 |
| Margin | | | |
| 9010321 | | | |
| Normal | 6.3 | 10.8 | 8.8 |
| Uterus | | | |
| Uterus | 3.5 | 1.1 | 3.5 |
| Cancer | | | |
| 064011 | | | |
| Normal | 18.3 | 10.5 | 5.8 |
| Thyroid | | | |
| Thyroid | 21.8 | 23.0 | 15.6 |
| Cancer | | | |
| 064010 | | | |
| Thyroid | 15.8 | 15.4 | 12.1 |
| Cancer | | | |
| A302152 | | | |
| Thyroid | 6.0 | 8.0 | 5.5 |
| Margin | | | |
| A302153 | | | |
| Normal | 8.5 | 12.7 | 4.8 |
| Breast | | | |
| Breast | 71.7 | 79.6 | 43.2 |
| Cancer | | | |
| (OD04566) | | | |
| Breast | 88.3 | 55.9 | 100.0 |
| Cancer | | | |
| (OD04590-01) | | | |
| Breast Cancer | 66.9 | 59.5 | 80.1 |
| Mets | | | |
| (OD04590-03) | | | |
| Breast Cancer | 100.0 | 100.0 | 82.9 |
| Metastasis | | | |
| (OD04655-05) | | | |
| Breast Cancer | 6.0 | 7.9 | 2.8 |
| 064006 | | | |
| Breast Cancer | 13.1 | 4.1 | 3.6 |
| 1024 | | | |
| Breast Cancer | 90.8 | 80.7 | 69.7 |
| 9100266 | | | |
| Breast | 16.8 | 18.6 | 7.1 |
| Margin | | | |
| 9100265 | | | |
| Breast Cancer | 4.2 | 0.3 | 2.0 |
| A209073 | | | |
| Breast | 4.5 | 2.0 | 3.1 |
| Margin | | | |
| A209073 | | | |
| Normal Liver | 0.0 | 0.0 | 0.0 |
| Liver Cancer | 0.0 | 0.0 | 0.0 |
| 064003 | | | |
| Liver Cancer | 0.0 | 0.0 | 0.8 |
| 1025 | | | |
| Liver Cancer | 4.3 | 7.6 | 3.4 |
| 1026 | | | |
| Liver Cancer | 0.0 | 0.0 | 0.4 |
| 6004-T | | | |
| Liver Tissue | 0.7 | 0.0 | 0.0 |
| 6004-N | | | |
| Liver Cancer | 2.6 | 7.4 | 3.5 |
| 6005-T | | | |
| Liver Tissue | 0.5 | 0.6 | 0.6 |
| 6005-N | | | |
| Normal | 12.9 | 15.0 | 8.3 |
| Bladder | | | |
| Bladder | 0.4 | 1.6 | 0.2 |
| Cancer 1023 | | | |
| Bladder | 0.7 | 2.9 | 0.0 |
| Cancer | | | |
| A302173 | | | |
| Bladder | 9.6 | 19.5 | 5.6 |
| Cancer | | | |
| (OD04718-01) | | | |
| Bladder | 5.3 | 10.2 | 6.5 |
| Normal | | | |
| Adjacent | | | |
| (OD04718-03) | | | |
| Normal Ovary | 5.3 | 5.7 | 9.4 |
| Ovarian | 70.7 | 62.9 | 67.8 |
| Cancer | | | |
| 064008 | | | |
| Ovarian | 9.9 | 4.8 | 5.3 |
| Cancer | | | |
| (OD04768-07) | | | |
| Ovary Margin | 1.2 | 6.2 | 4.0 |
| (OD04768-08) | | | |
| Normal | 2.1 | 1.9 | 0.9 |
| Stomach | | | |
| Gastric | 2.5 | 2.9 | 0.4 |
| Cancer | | | |
| 9060358 | | | |
| Stomach | 0.6 | 2.4 | 1.2 |
| Margin | | | |
| 9060359 | | | |
| Gastric | 8.4 | 6.3 | 2.5 |
| Cancer | | | |
| 9060395 | | | |
| Stomach | 4.0 | 2.5 | 0.9 |
| Margin | | | |
| 9060394 | | | |
| Gastric | 0.4 | 1.9 | 0.7 |
| Cancer | | | |
| 9060397 | | | |
| Stomach | 1.5 | 1.2 | 1.0 |
| Margin | | | |
| 9060396 | | | |
| Gastric | 4.5 | 3.0 | 2.6 |
| Cancer | | | |
| 064005 | | | |

[0752] TABLE NG
Panel 3D

| | Rel. Exp. (%) |
|---|---|
| | Ag241, |
| | Run |
| Tissue Name | 165022800 |
| Daoy- Medulloblastoma | 0.8 |
| TE671- Medulloblastoma | 2.1 |
| D283 Med- Medulloblastoma | 0.0 |
| PFSK-1- Primitive | 0.0 |
| Neuroectodermal | |
| XF-498- CNS | 0.0 |
| SNB-78- Glioma | 0.0 |
| SF-268- Glioblastoma | 0.0 |
| T98G- Glioblastoma | 0.0 |
| SK-N-SH- Neuroblastoma (metastasis) | 1.8 |
| SF-295- Glioblastoma | 0.0 |
| Cerebellum | 1.1 |
| Cerebellum | 0.0 |
| NCI-H292- Mucoepidermoid lung carcinoma | 6.8 |
| DMS-114- Small cell lung cancer | 0.8 |
| DMS-79- Small cell lung cancer | 9.5 |
| NCI-H146- Small cell lung cancer | 0.7 |
| NCI-H526- Small cell lung cancer | 4.0 |
| NCI-N417- Small cell lung cancer | 0.8 |
| NCI-H82- Small cell lung cancer | 0.0 |
| NCI-H157- Squamous cell lung cancer (metastasis) | 0.0 |
| NCI-H1155- Large cell lung cancer | 0.0 |
| NCI-H1299- Large cell lung cancer | 0.0 |
| NCI-H727- Lung carcinoid | 1.0 |
| NCI-UMC-11- Lung carcinoid | 0.0 |
| LX-1- Small cell lung cancer | 0.0 |
| Colo-205- Colon cancer | 0.0 |
| KM12- Colon cancer | 0.0 |
| KM20L2- Colon cancer | 1.8 |
| NCI-H716- Colon cancer | 0.0 |
| SW-48- Colon adenocarcinoma | 0.0 |
| SW1116- Colon adenocarcinoma | 0.0 |
| LS 174T- Colon adenocarcinoma | 14.4 |
| SW-948- Colon adenocarcinoma | 0.0 |
| SW-480- Colon adenocarcinoma | 0.6 |
| NCI-SNU-5- Gastric carcinoma | 1.4 |
| KATO III- Gastric carcinoma | 0.0 |
| NCI-SNU-16- Gastric carcinoma | 0.0 |
| NCI-SNU-1- Gastric carcinoma | 0.0 |
| RF-1- Gastric adenocarcinoma | 0.0 |
| RF-48- Gastric adenocarcinoma | 0.0 |
| MKN-45- Gastric carcinoma | 18.2 |
| NCI-N87- Gastric carcinoma | 12.2 |
| OVCAR-5- Ovarian carcinoma | 0.0 |
| RL95-2- Uterine carcinoma | 0.0 |
| HelaS3- Cervical adenocarcinoma | 100.0 |
| Ca Ski- Cervical epidermoid carcinoma (metastasis) | 0.0 |
| ES-2- Ovarian clear cell carcinoma | 0.0 |
| Ramos- Stimulated with PMA/ionomycin 6 h | 0.0 |
| Ramos- Stimulated with PMA/ionomycin 14 h | 0.0 |
| MEG-01- Chronic myelogenous leukemia | 0.0 |
| (megokaryoblast) | |
| Raji- Burkitt's lymphoma | 0.0 |
| Daudi- Burkitt's lymphoma | 0.0 |
| U266- B-cell plasmacytoma | 6.8 |
| CA46- Burkitt's lymphoma | 0.0 |
| RL- non-Hodgkin's B-cell lymphoma | 0.0 |
| JM1- pre-B-cell lymphoma | 0.0 |
| Jurkat- T cell leukemia | 0.0 |
| TF-1- Erythroleukemia | 0.0 |
| HUT 78- T-cell lymphoma | 0.0 |
| U937- Histiocytic lymphoma | 0.0 |
| KU-812- Myelogenous leukemia | 0.0 |
| 769-P- Clear cell renal carcinoma | 0.0 |
| Caki-2- Clear cell renal carcinoma | 0.0 |
| SW 839- Clear cell renal carcinoma | 0.0 |
| Rhabdoid kidney tumor | 28.1 |
| Hs766T- Pancreatic carcinoma (LN metastasis) | 0.4 |
| CAPAN-1- Pancreatic adenocarcinoma (liver metastasis) | 2.0 |
| SU86.86- Pancreatic carcinoma (liver metastasis) | 0.7 |
| BxPC-3- Pancreatic adenocarcinoma | 1.7 |
| HPAC- Pancreatic adenocarcinoma | 1.4 |
| MIA PaCa-2- Pancreatic carcinoma | 4.6 |
| CFPAC-1- Pancreatic ductal adenocarcinoma | 0.0 |
| PANC-1- Pancreatic epithelioid ductal carcinoma | 15.7 |
| T24- Bladder carcinma (transitional cell) | 0.0 |
| 5637- Bladder carcinoma | 2.3 |
| HT-1197- Bladder carcinoma | 0.0 |
| UM-UC-3- Bladder carcinma (transitional cell) | 0.0 |
| A204- Rhabdomyosarcoma | 0.0 |
| HT-1080- Fibrosarcoma | 0.0 |
| MG-63- Osteosarcoma | 0.0 |
| SK-LMS-1- Leiomyosarcoma (vulva) | 7.6 |
| SJRH30- Rhabdomyosarcoma (met to bone marrow) | 0.0 |
| A431- Epidermoid carcinoma | 0.0 |
| WM266-4- Melanoma | 19.1 |
| DU 145- Prostate carcinoma (brain metastasis) | 0.0 |
| MDA-MB-468- Breast adenocarcinoma | 0.5 |
| SCC-4- Squamous cell carcinoma of tongue | 0.0 |
| SCC-9- Squamous cell carcinoma of tongue | 0.0 |
| SCC-15- Squamous cell carcinoma of tongue | 0.0 |
| CAL 27- Squamous cell carcinoma of tongue | 2.0 |

[0753] TABLE NH
Panel 4.1D

| | Rel. Exp. (%) |
|---|---|
| | Ag3074, |
| | Run |
| Tissue Name | 248389309 |
| Secondary Th1 act | 0.0 |
| Secondary Th2 act | 1.6 |
| Secondary Tr1 act | 3.3 |
| Secondary Th1 rest | 0.0 |
| Secondary Th2 rest | 0.0 |
| Secondary Tr1 rest | 0.0 |
| Primary Th1 act | 5.2 |
| Primary Th2 act | 0.0 |
| Primary Tr1 act | 0.0 |
| Primary Th1 rest | 0.0 |
| Primary Th2 rest | 0.0 |
| Primary Tr1 rest | 0.0 |
| CD45RA CD4 lymphocyte act | 5.6 |
| CD45RO CD4 lymphocyte act | 4.0 |
| CD8 lymphocyte act | 0.0 |
| Secondary CD8 lymphocyte rest | 0.0 |
| Secondary CD8 lymphocyte act | 0.0 |
| CD4 lymphocyte none | 0.0 |
| 2ry Th1/Th2/Tr1_anti-CD95 CH11 | 0.0 |
| LAK cells rest | 0.0 |
| LAK cells IL-2 | 0.0 |
| LAK cells IL-2 + IL-12 | 0.0 |
| LAK cells IL-2 + IFN gamma | 0.0 |
| LAK cells IL-2 + IL-18 | 0.0 |
| LAK cells PMA/ionomycin | 0.0 |
| NK Cells IL-2 rest | 0.0 |
| Two Way MLR 3 day | 0.0 |
| Two Way MLR 5 day | 0.0 |
| Two Way MLR 7 day | 0.0 |
| PBMC rest | 0.0 |
| PBMC PWM | 0.0 |
| PBMC PHA-L | 3.4 |
| Ramos (B cell) none | 0.0 |
| Ramos (B cell) ionomycin | 0.0 |
| B lymphocytes PWM | 0.0 |
| B lymphocytes CD40L and IL-4 | 1.0 |
| EOL-1 dbcAMP | 0.0 |
| EOL-1 dbcAMP PMA/ionomycin | 0.0 |
| Dendritic cells none | 0.0 |
| Dendritic cells LPS | 0.0 |
| Dendritic cells anti-CD40 | 0.0 |
| Monocytes rest | 0.0 |
| Monocytes LPS | 0.0 |
| Macrophages rest | 0.0 |
| Macrophages LPS | 0.0 |
| HUVEC none | 0.0 |
| HUVEC starved | 0.0 |
| HUVEC IL-1beta | 0.0 |
| HUVEC IFN gamma | 0.0 |
| HUVEC TNF alpha + IFN gamma | 0.0 |
| HUVEC TNF alpha + IL4 | 0.0 |
| HUVEC IL-11 | 0.0 |
| Lung Microvascular EC none | 0.0 |
| Lung Microvascular EC TNFalpha + IL-1beta | 0.0 |
| Microvascular Dermal EC none | 0.0 |
| Microsvasular Dermal EC TNFalpha + IL-1beta | 0.0 |
| Bronchial epithelium TNFalpha + IL1beta | 0.0 |
| Small airway epithelium none | 0.0 |
| Small airway epithelium TNFalpha + IL-1beta | 0.0 |
| Coronery artery SMC rest | 0.0 |
| Coronery artery SMC TNFalpha + IL-1beta | 0.0 |
| Astrocytes rest | 0.0 |
| Astrocytes TNFalpha + IL-1beta | 5.8 |
| KU-812 (Basophil) rest | 0.0 |
| KU-812 (Basophil) PMA/ionomycin | 0.0 |
| CCD1106 (Keratinocytes) none | 0.0 |
| CCD1106 (Keratinocytes) TNFalpha + IL-1beta | 0.0 |
| Liver cirrhosis | 0.0 |
| NCI-H292 none | 13.7 |
| NCI-H292 IL-4 | 0.0 |
| NCI-H292 IL-9 | 17.4 |
| NCI-H292 IL-13 | 20.7 |
| NCI-H292 IFN gamma | 13.0 |
| HPAEC none | 0.0 |
| HPAEC TNF alpha + IL-1 beta | 0.0 |
| Lung fibroblast none | 0.0 |
| Lung fibroblast TNF alpha + IL-1 beta | 0.0 |
| Lung fibroblast IL-4 | 0.0 |
| Lung fibroblast IL-9 | 0.0 |
| Lung fibroblast IL-13 | 0.0 |
| Lung fibroblast IFN gamma | 0.0 |
| Dermal fibroblast CCD1070 rest | 4.2 |
| Dermal fibroblast CCD1070 TNF alpha | 0.0 |
| Dermal fibroblast CCD1070 IL-1 beta | 1.0 |
| Dermal fibroblast IFN gamma | 100.0 |
| Dermal fibroblast IL-4 | 78.5 |
| Dermal Fibroblasts rest | 59.9 |
| Neutrophils TNFa + LPS | 0.0 |
| Neutrophils rest | 0.0 |
| Colon | 0.0 |
| Lung | 0.0 |
| Thymus | 0.0 |
| Kidney | 0.0 |

[0754] TABLE NI
Panel 4D

| | Rel. Exp. (%) | Rel. Exp. (%) |
|---|---|---|
| | Ag241, Run | Ag3074, Run |
| Tissue Name | 165010380 | 162598884 |
| Secondary Th1 act | 5.6 | 0.0 |
| Secondary Th2 act | 1.7 | 0.0 |
| Secondary Tr1 act | 0.0 | 0.0 |
| Secondary Th1 rest | 0.0 | 0.0 |
| Secondary Th2 rest | 0.0 | 0.0 |
| Secondary Tr1 rest | 0.0 | 0.0 |
| Primary Th1 act | 40.9 | 33.7 |
| Primary Th2 act | 2.0 | 0.0 |
| Primary Tr1 act | 6.7 | 0.0 |
| Primary Th1 rest | 1.5 | 0.0 |
| Primary Th2 rest | 0.0 | 0.0 |
| Primary Tr1 rest | 0.0 | 0.0 |
| CD45RA CD4 lymphocyte act | 2.7 | 0.0 |
| CD45RO CD4 lymphocyte act | 5.7 | 0.0 |
| CD8 lymphocyte act | 0.0 | 2.6 |
| Secondary CD8 lymphocyte rest | 1.6 | 11.2 |
| Secondary CD8 lymphocyte act | 0.0 | 0.0 |
| CD4 lymphocyte none | 0.0 | 0.0 |
| 2ry Th1/Th2/Tr1_anti-CD95 CH11 | 0.0 | 0.0 |
| LAK cells rest | 0.0 | 0.0 |
| LAK cells IL-2 | 1.7 | 0.0 |
| LAK cells IL-2 + IL-12 | 1.7 | 0.0 |
| LAK cells IL-2 + IFN gamma | 0.0 | 0.0 |
| LAK cells IL-2 + IL-18 | 0.0 | 1.6 |
| LAK cells PMA/ionomycin | 0.2 | 0.0 |
| NK Cells IL-2 rest | 0.0 | 0.0 |
| Two Way MLR 3 day | 0.0 | 0.0 |
| Two Way MLR 5 day | 0.0 | 0.0 |
| Two Way MLR 7 day | 0.0 | 0.0 |
| PBMC rest | 0.0 | 0.0 |
| PBMC PWM | 14.5 | 2.2 |
| PBMC PHA-L | 4.1 | 2.0 |
| Ramos (B cell) none | 0.0 | 0.0 |
| Ramos (B cell) ionomycin | 0.0 | 0.0 |
| B lymphocytes PWM | 27.2 | 4.2 |
| B lymphocytes CD40L and IL-4 | 3.1 | 0.0 |
| EOL-1 dbcAMP | 0.0 | 0.0 |
| EOL-1 dbcAMP PMA/ionomycin | 0.0 | 0.0 |
| Dendritic cells none | 0.0 | 0.0 |
| Dendritic cells LPS | 0.0 | 2.8 |
| Dendritic cells anti-CD40 | 0.0 | 0.0 |
| Monocytes rest | 0.0 | 0.0 |
| Monocytes LPS | 1.6 | 0.0 |
| Macrophages rest | 0.0 | 0.0 |
| Macrophages LPS | 0.0 | 0.0 |
| HUVEC none | 0.0 | 0.0 |
| HUVEC starved | 0.0 | 0.0 |
| HUVEC IL-1beta | 0.0 | 0.0 |
| HUVEC IFN gamma | 0.0 | 0.0 |
| HUVEC TNF alpha + IFN gamma | 0.0 | 0.0 |
| HUVEC TNF alpha + IL4 | 0.0 | 0.0 |
| HUVEC IL-11 | 0.0 | 0.0 |
| Lung Microvascular EC none | 0.0 | 0.0 |
| Lung Microvascular EC | 0.0 | 0.0 |
| TNFalpha + IL-1beta | | |
| Microvascular Dermal EC none | 0.0 | 0.0 |
| Microsvasular Dermal EC | 0.0 | 0.0 |
| TNFalpha + IL-1beta | | |
| Bronchial epithelium | 1.4 | 0.0 |
| TNFalpha + IL1beta | | |
| Small airway epithelium none | 0.0 | 0.0 |
| Small airway epithelium | 0.0 | 0.0 |
| TNFalpha + IL-1beta | | |
| Coronery artery SMC rest | 6.9 | 0.0 |
| Coronery artery SMC | 0.0 | 0.0 |
| TNFalpha + IL-1beta | | |
| Astrocytes rest | 0.0 | 0.0 |
| Astrocytes | 1.3 | 12.9 |
| TNFalpha + IL-1beta | | |
| KU-812 (Basophil) rest | 0.0 | 0.0 |
| KU-812 (Basophil) PMA/ionomycin | 0.0 | 0.0 |
| CCD1106 (Keratinocytes) none | 0.0 | 0.0 |
| CCD1106 (Keratinocytes) | 0.0 | 0.0 |
| TNFalpha + IL-1beta | | |
| Liver cirrhosis | 10.2 | 2.7 |
| Lupus kidney | 0.2 | 3.1 |
| NCI-H292 none | 19.6 | 9.9 |
| NCI-H292 IL-4 | 25.3 | 3.5 |
| NCI-H292 IL-9 | 74.7 | 31.6 |
| NCI-H292 IL-13 | 21.0 | 12.8 |
| NCI-H292 IFN gamma | 23.2 | 29.1 |
| HPAEC none | 0.0 | 0.0 |
| HPAEC TNF alpha + IL-1 beta | 0.0 | 0.0 |
| Lung fibroblast none | 0.0 | 0.0 |
| Lung fibroblast | 0.0 | 0.0 |
| TNF alpha + IL-1 beta | | |
| Lung fibroblast IL-4 | 0.0 | 0.0 |
| Lung fibroblast IL-9 | 0.0 | 0.0 |
| Lung fibroblast IL-13 | 0.0 | 2.6 |
| Lung fibroblast IFN gamma | 0.0 | 0.0 |
| Dermal fibroblast CCD1070 rest | 5.5 | 3.2 |
| Dermal fibroblast CCD1070 | 1.6 | 0.0 |
| TNF alpha | | |
| Dermal fibroblast CCD1070 | 2.6 | 0.0 |
| IL-1 beta | | |
| Dermal fibroblast IFN gamma | 100.0 | 100.0 |
| Dermal fibroblast IL-4 | 87.7 | 61.1 |
| IBD Colitis 2 | 0.0 | 0.0 |
| IBD Crohn's | 0.0 | 0.0 |
| Colon | 52.5 | 3.0 |
| Lung | 43.5 | 25.3 |
| Thymus | 9.7 | 3.7 |
| Kidney | 4.7 | 4.9 |

[0755] AI.05 chondrosarcoma Summary: Ag3074 Highest expression of this gene is detected in IL-1b/oncostatin treated chondrosarcoma cell line (SW1353). Interestingly, expression of this gene appears to be somewhat up-regulated upon IL-1 treatment, a potent activator of pro-inflammatory cytokines and matrix metalloproteinases, which participate in the destruction of cartilage observed in Osteoarthritis (OA). Modulation of the expression of this transcript in chondrocytes by either small molecules or antisense might be important for preventing the degeneration of cartilage observed in OA and Rheumatoid Arthritis.

[0756] AI_comprehensive panel_v1.0 Summary: Ag3074 Low but significant levels of expression of this gene are detected in in joint tissue from osteoarthritic (OA) patients including OA bone and adjacent bone as well as OA cartilage, OA synovium and OA synovial fluid samples. This gene is not expressed at significant levels in corresponding normal tissues. This gene codes for tandem acid-sensitive potassium channel TASK5. This family of K+ channels are very sensitive to small changes in extracellular pH, suggesting that TASK has a role in cellular responses to changes in extracellular pH (OMIM 603220). Therefore, small molecule therapeutics and antibody therapeutics based on the protein encoded for by this gene could reduce or inhibit inflammation and tissue destruction associated with the onset and progression of osteoarthritis and rheumatoid arthritis.

[0757] Low level expression of this gene is also detected in samples derived from normal lung samples, COPD lung, emphysema, atopic asthma, asthma, allergy, Crohn's disease (normal matched control and diseased), ulcerative colitis(normal matched control and diseased), and psoriasis (normal matched control and diseased). Therefore, therapeutic modulation of this gene product may ameliorate symptoms/conditions associated with autoimmune and inflammatory disorders including psoriasis, allergy, asthma, and inflammatory bowel disease.

[0758] Panel 1.3D Summary: Ag241/Ag3074 Three experiments with two different probe and primer sets produce results that are in very good agreement. Expression of this gene in this panel is most prominent in cancer cell lines, with highest expression in a gastric cancer cell line (CTs=28). Significant levels of expression are also seen in cell lines derived from prostate cancer, ovarian cancer, breast cancer, lung cancer, and renal cancer. Thus, the therapeutic inhibition of this gene activity, through the use of small molecule drugs or antibodies, might be of utility in the treatment of the above listed cancer types. In addition, expression of this gene could be used as a diagnostic marker for cancer.

[0759] Among metabolic tissues, this gene has a low level of expression in adrenal, pituitary, heart and adipose. Thus, this gene product may be a small molecule target for the treatment of metabolic and endocrine disease, including the adrenalopathies, obesity and Type 2 diabetes.

[0760] Results from one experiment with the Ag241 (Run 165628181) show low/undetectable levels of expression in all the samples on this panel (CTs>35).

[0761] See Maingret F, Patel A J, Lesage F, Lazdunski M, Honore E. Lysophospholipids open the two-pore domain mechano-gated K(+) channels TREK-1 and TRAAK. J Biol Chem. Apr. 7, 2000;275(14):10128-33. PMID: 10744694; and Ouadid-Ahidouch H, Chaussade F, Roudbaraki M, Slomianny C, Dewailly E, Delcourt P, Prevarskaya N. KV1.1 K(+) channels identification in human breast carcinoma cells: involvement in cell proliferation. Biochem Biophys Res Commun November 2000 19;278(2):272-7. (the report from Ouadid-Ahidouch et al. shows how potassium current are important for breast cancer cell proliferation, suggesting that CG54092-01, a potassium channel, plays a role in tumor cell growth and proliferation).

[0762] Panel 2D Summary: Ag241/Ag3041 The expression of the this gene gene was assessed in three independent runs with good concordance between the runs. This gene is expressed at a higher level in colon, thyroid, breast and bladder cancer samples compared to normal adjacent tissues. In addition, significant levels of expression are seen in ovarian cancer samples. This expression is in agreement with the cell-line expression seen in Panels 1.3D and 3D. Hence this gene can be used as a diagnostic marker for these cancers. Furthermore, targeting of TASK5 encoded by this gene with a human monoclonal antibody that results in an inhibition of the activity of the associated channel will have therapeutic effect on tumors, preferably on breast, ovarian and colon cell carcinoma and will result in reduced cell growth and proliferation.

[0763] Panel 3D Summary: Ag241 The expression of this gene was assessed in one run. This gene is expressed in in several cell lines including melanoma, gastric cancer, kidney cancer, cervical cancer and lung cancer cell lines. Thus, the therapeutic inhibition of this gene activity, through the use of small molecule drugs or antibodies, might be useful in the treatment of the above listed cancer types.

[0764] Panel 4.1D Summary: Ag3074 Highest expression is seen in IFN-gamma treated dermal fibroblasts (CT33.3). Please see Panel 4D for discussion of this gene in autoimmune disease.

[0765] Panel 4D Summary: Ag241/Ag3074 Two experiments with two different probe and primer sets show highest expression of this gene in dermal fibroblasts treated with IFN-gamma (CTs=30-33). Significant expression is also seen in dermal fibroblasts treated with IL-4. This expression suggests that the protein encoded by this gene may be involved in skin disorders, such as psoriasis. Significant levels of expression are also seen in both treated and untreated samples derived from the mucoepidermoid pulmonary cell line NCI-H292, astrocytes and some activated T cell populations. This expression profile suggests that the gene product may also be involved in inflammatory processes that affect the lung. Therefore, therapeutic modulation of the expression or function of the protein encoded by this gene may be effective in the treatment of asthma, allergies, emphysema and COPD.

[0766] O. CG55798-02: Olfactory Receptor.

[0767] Expression of gene CG55798-02 was assessed using the primer-probe sets Ag1500, Ag2609 and Ag2611, described in Tables OA, OB and OC. Results of the RTQ-PCR runs are shown in Tables OD, OE, OF, OG, OH and OI. Please note that CG55798-02 represents a full length physical clone.

TABLE OA
Probe Name Ag1500

| | | | Start | SEQ |
|---|---|---|---|---|
| Primers | Sequences | Length | Position | ID No |
| Forward | 5′-tgattgtctgtgtggataaacg-3′ | 22 | 140 | 196 |
| Probe | TET-5′-tcttcctcagccacctctctaccctg-3′-TAMRA | 26 | 182 | 197 |
| Reverse | 5′-ttatggttgtgaccaggatctc-3′ | 22 | 208 | 198 |

[0768] TABLE OB
Probe Name Ag2609

| | | | Start | SEQ |
|---|---|---|---|---|
| Primers | Sequences | Length | Position | ID No |
| Forward | 5′-cattgtgattgtctgtgtggat-3′ | 22 | 135 | 199 |
| Probe | TET-5′-tcttcctcagccacctctctaccctg-3′-TAMRA | 26 | 182 | 200 |
| Reverse | 5′-ttatggttgtgaccaggatctc-3′ | 22 | 208 | 201 |

[0769] TABLE OG
Probe Name Ag2611

| | | | Start | SEQ |
|---|---|---|---|---|
| Primers | Sequences | Length | Position | ID No |
| Forward | 5′-tgattgtctgtgtggataaacg-3′ | 22 | 140 | 202 |
| Probe | TET-5′-tcttcctcagccacctctctaccctg-3′-TAMRA | 26 | 182 | 203 |
| Reverse | 5′-ttatggttgtgaccaggatctc-3′ | 122 | 208 | 204 |

[0770] TABLE OD
CNS_neurodegeneration_v1.0

| | Rel. Exp. (%) | Rel. Exp. (%) |
|---|---|---|
| | Ag2609, Run | Ag2611, Run |
| Tissue Name | 208971592 | 208971593 |
| AD 1 Hippo | 12.7 | 2.2 |
| AD 2 Hippo | 39.5 | 11.1 |
| AD 3 Hippo | 7.3 | 0.9 |
| AD 4 Hippo | 4.2 | 0.8 |
| AD 5 Hippo | 36.3 | 14.0 |
| AD 6 Hippo | 63.7 | 11.3 |
| Control 2 Hippo | 11.3 | 3.5 |
| Control 4 Hippo | 2.5 | 0.9 |
| Control (Path) 3 Hippo | 5.0 | 1.1 |
| AD 1 Temporal Ctx | 21.3 | 7.5 |
| AD 2 Temporal Ctx | 31.2 | 12.1 |
| AD 3 Temporal Ctx | 9.5 | 1.9 |
| AD 4 Temporal Ctx | 28.1 | 3.7 |
| AD 5 Inf Temporal Ctx | 74.7 | 13.6 |
| AD 5 Sup Temporal Ctx | 18.2 | 4.2 |
| AD 6 Inf Temporal Ctx | 54.7 | 16.2 |
| AD 6 Sup Temporal Ctx | 39.8 | 13.6 |
| Control 1 Temporal Ctx | 3.2 | 1.0 |
| Control 2 Temporal Ctx | 7.1 | 3.1 |
| Control 3 Temporal Ctx | 8.2 | 2.6 |
| Control 3 Temporal Ctx | 6.3 | 5.1 |
| Control (Path) 1 Temporal Ctx | 34.6 | 9.7 |
| Control (Path) 2 Temporal Ctx | 19.6 | 5.1 |
| Control (Path) 3 Temporal Ctx | 0.0 | 0.8 |
| Control (Path) 4 Temporal Ctx | 12.7 | 2.5 |
| AD 1 Occipital Ctx | 12.8 | 100.0 |
| AD 2 Occipital Ctx (Missing) | 0.0 | 0.0 |
| AD 3 Occipital Ctx | 6.2 | 1.8 |
| AD 4 Occipital Ctx | 9.7 | 3.9 |
| AD 5 Occipital Ctx | 13.4 | 4.7 |
| AD 6 Occipital Ctx | 19.9 | 4.0 |
| Control 1 Occipital Ctx | 15.9 | 2.0 |
| Control 2 Occipital Ctx | 24.7 | 7.0 |
| Control 3 Occipital Ctx | 8.8 | 4.5 |
| Control 4 Occipital Ctx | 4.5 | 2.9 |
| Control (Path) 1 Occipital Ctx | 100.0 | 17.8 |
| Control (Path) 2 Occipital Ctx | 17.9 | 5.8 |
| Control (Path) 3 Occipital Ctx | 2.8 | 1.8 |
| Control (Path) 4 Occipital Ctx | 12.3 | 6.7 |
| Control 1 Parietal Ctx | 20.4 | 8.1 |
| Control 2 Parietal Ctx | 19.3 | 4.8 |
| Control 3 Parietal Ctx | 30.4 | 6.8 |
| Control (Path) 1 Parietal Ctx | 40.9 | 11.5 |
| Control (Path) 2 Parietal Ctx | 21.2 | 6.3 |
| Control (Path) 3 Parietal Ctx | 3.7 | 0.7 |
| Control (Path) 4 Parietal Ctx | 32.1 | 8.5 |

[0771] TABLE OE
Panel 1.2

| | Rel. |
|---|---|
| | Exp. (%) |
| | Ag1500, |
| | Run |
| Tissue Name | 141889923 |
| Endothelial cells | 3.1 |
| Heart (Fetal) | 2.7 |
| Pancreas | 0.0 |
| Pancreatic ca. CAPAN 2 | 2.8 |
| Adrenal Gland | 8.4 |
| Thyroid | 0.0 |
| Salivary gland | 39.8 |
| Pituitary gland | 1.4 |
| Brain (fetal) | 1.2 |
| Brain (whole) | 5.0 |
| Brain (amygdala) | 4.3 |
| Brain (cerebellum) | 13.7 |
| Brain (hippocampus) | 31.4 |
| Brain (thalamus) | 50.7 |
| Cerebral Cortex | 100.0 |
| Spinal cord | 18.3 |
| glio/astro U87-MG | 12.1 |
| glio/astro U-118-MG | 0.0 |
| astrocytoma SW1783 | 11.6 |
| neuro*; met SK-N-AS | 8.5 |
| astrocytoma SF-539 | 1.1 |
| astrocytoma SNB-75 | 22.4 |
| glioma SNB-19 | 19.1 |
| glioma U251 | 2.4 |
| glioma SF-295 | 12.2 |
| Heart | 15.5 |
| Skeletal Muscle | 7.0 |
| Bone marrow | 1.7 |
| Thymus | 0.9 |
| Spleen | 0.0 |
| Lymph node | 0.0 |
| Colorectal Tissue | 6.2 |
| Stomach | 0.0 |
| Small intestine | 2.4 |
| Colon ca. SW480 | 1.1 |
| Colon ca.* SW620 (SW480 met) | 5.8 |
| Colon ca. HT29 | 14.2 |
| Colon ca. HCT-116 | 3.2 |
| Colon ca. CaCo-2 | 10.8 |
| Colon ca. Tissue (ODO3866) | 17.8 |
| Colon ca. HCC-2998 | 6.9 |
| Gastric ca.* (liver met) NCI-N87 | 12.2 |
| Bladder | 17.4 |
| Trachea | 0.0 |
| Kidney | 14.9 |
| Kidney (fetal) | 16.7 |
| Renal ca. 786-0 | 8.0 |
| Renal ca. A498 | 11.5 |
| Renal ca. RXF 393 | 3.6 |
| Renal ca. ACHN | 4.2 |
| Renal ca. UO-31 | 8.0 |
| Renal ca. TK-10 | 24.5 |
| Liver | 0.0 |
| Liver (fetal) | 1.1 |
| Liver ca. (hepatoblast) HepG2 | 1.9 |
| Lung | 0.0 |
| Lung (fetal) | 1.0 |
| Lung ca. (small cell) LX-1 | 30.4 |
| Lung ca. (small cell) NCI-H69 | 65.5 |
| Lung ca. (s. cell var.) SHP-77 | 1.5 |
| Lung ca. (large cell)NCI-H460 | 23.2 |
| Lung ca. (non-sm. cell) A549 | 13.9 |
| Lung ca. (non-s. cell) NCI-H23 | 31.4 |
| Lung ca. (non-s. cell) HOP-62 | 28.5 |
| Lung ca. (non-s. cl) NCI-H522 | 51.1 |
| Lung ca. (squam.) SW 900 | 4.3 |
| Lung ca. (squam.) NCI-H596 | 22.4 |
| Mammary gland | 18.2 |
| Breast ca.* (pl. ef) MCF-7 | 4.5 |
| Breast ca.* (pl. ef) MDA-MB-231 | 0.0 |
| Breast ca.* (pl. ef) T47D | 91.4 |
| Breast ca. BT-549 | 10.6 |
| Breast ca. MDA-N | 63.3 |
| Ovary | 7.9 |
| Ovarian ca. OVCAR-3 | 8.1 |
| Ovarian ca. OVCAR-4 | 20.2 |
| Ovarian ca. OVCAR-5 | 95.9 |
| Ovarian ca. OVCAR-8 | 88.3 |
| Ovarian ca. IGROV-1 | 24.7 |
| Ovarian ca. (ascites) SK-OV-3 | 16.4 |
| Uterus | 1.1 |
| Placenta | 27.7 |
| Prostate | 3.2 |
| Prostate ca.* (bone met) PC-3 | 14.5 |
| Testis | 0.0 |
| Melanoma Hs688(A).T | 2.3 |
| Melanoma* (met) Hs688(B).T | 12.3 |
| Melanoma UACC-62 | 54.7 |
| Melanoma M14 | 89.5 |
| Melanoma LOX IMVI | 0.0 |
| Melanoma* (met) SK-MEL-5 | 21.5 |

[0772] TABLE OF
Panel 1.3D

| | Rel. Exp. (%) | Rel. Exp. (%) |
|---|---|---|
| | Ag2609, Run | Ag2611, Run |
| Tissue Name | 166219826 | 166190369 |
| Liver adenocarcinoma | 0.0 | 0.0 |
| Pancreas | 0.0 | 0.0 |
| Pancreatic ca. CAPAN2 | 0.0 | 7.0 |
| Adrenal gland | 12.9 | 0.0 |
| Thyroid | 0.0 | 0.0 |
| Salivary gland | 6.2 | 0.0 |
| Pituitary gland | 0.0 | 0.0 |
| Brain (fetal) | 26.4 | 0.0 |
| Brain (whole) | 26.2 | 26.8 |
| Brain (amygdala) | 3.9 | 5.4 |
| Brain (cerebellum) | 0.0 | 6.6 |
| Brain (hippocampus) | 17.2 | 6.2 |
| Brain (substantia nigra) | 31.9 | 78.5 |
| Brain (thalamus) | 82.4 | 100.0 |
| Cerebral Cortex | 0.0 | 19.2 |
| Spinal cord | 100.0 | 100.0 |
| glio/astro U87-MG | 0.0 | 0.0 |
| glio/astro U-118-MG | 0.0 | 0.0 |
| astrocytoma SW1783 | 6.9 | 0.0 |
| neuro*; met SK-N-AS | 0.0 | 0.0 |
| astrocytoma SF-539 | 0.0 | 0.0 |
| astrocytoma SNB-75 | 0.0 | 0.0 |
| glioma SNB-19 | 5.7 | 5.7 |
| glioma U251 | 0.0 | 0.0 |
| glioma SF-295 | 6.7 | 0.0 |
| Heart (fetal) | 0.0 | 6.1 |
| Heart | 0.0 | 0.0 |
| Skeletal muscle (fetal) | 0.0 | 0.0 |
| Skeletal muscle | 0.0 | 0.0 |
| Bone marrow | 0.0 | 0.0 |
| Thymus | 0.0 | 0.0 |
| Spleen | 0.0 | 0.0 |
| Lymph node | 0.0 | 0.0 |
| Colorectal | 6.7 | 0.0 |
| Stomach | 0.0 | 0.0 |
| Small intestine | 0.0 | 15.4 |
| Colon ca. SW480 | 0.0 | 0.0 |
| Colon ca.* SW620(SW480 met) | 0.0 | 0.0 |
| Colon ca. HT29 | 0.0 | 0.0 |
| Colon ca. HCT-116 | 0.0 | 0.0 |
| Colon ca. CaCo-2 | 0.0 | 0.0 |
| Colon ca. tissue(ODO3866) | 0.0 | 0.0 |
| Colon ca. HCC-2998 | 0.0 | 0.0 |
| Gastric ca.* (liver met) NCI-N87 | 0.0 | 0.0 |
| Bladder | 0.0 | 0.0 |
| Trachea | 0.0 | 0.0 |
| Kidney | 0.0 | 0.0 |
| Kidney (fetal) | 0.0 | 0.0 |
| Renal ca. 786-0 | 0.0 | 0.0 |
| Renal ca. A498 | 0.0 | 0.0 |
| Renal ca. RXF 393 | 12.7 | 16.5 |
| Renal ca. ACHN | 0.0 | 0.0 |
| Renal ca. UO-31 | 0.0 | 0.0 |
| Renal ca. TK-10 | 7.4 | 0.0 |
| Liver | 0.0 | 0.0 |
| Liver (fetal) | 0.0 | 0.0 |
| Liver ca. (hepatoblast) HepG2 | 0.0 | 8.0 |
| Lung | 0.0 | 0.0 |
| Lung (fetal) | 0.0 | 0.0 |
| Lung ca. (small cell) LX-1 | 19.3 | 2.6 |
| Lung ca. (small cell) NCI-H69 | 0.0 | 0.0 |
| Lung ca. (s. cell var.) SHP-77 | 0.0 | 0.0 |
| Lung ca. (large cell)NCI-H460 | 0.0 | 0.0 |
| Lung ca. (non-sm. cell) A549 | 0.0 | 0.0 |
| Lung ca. (non-s. cell) NCI-H23 | 10.2 | 0.0 |
| Lung ca. (non-s. cell) HOP-62 | 0.0 | 6.2 |
| Lung ca. (non-s. cl) NCI-H522 | 0.0 | 0.0 |
| Lung ca. (squam.) SW 900 | 0.0 | 0.0 |
| Lung ca. (squam.) NCI-H596 | 0.0 | 0.0 |
| Mammary gland | 0.0 | 0.0 |
| Breast ca.* (pl. ef) MCF-7 | 0.0 | 0.0 |
| Breast ca.* (pl. ef) MDA-MB-231 | 0.0 | 0.0 |
| Breast ca.* (pl. ef) T47D | 22.1 | 32.5 |
| Breast ca. BT-549 | 0.0 | 0.0 |
| Breast ca. MDA-N | 3.2 | 29.7 |
| Ovary | 0.0 | 0.0 |
| Ovarian ca. OVCAR-3 | 0.0 | 0.0 |
| Ovarian ca. OVCAR-4 | 0.0 | 0.0 |
| Ovarian ca. OVCAR-5 | 10.7 | 0.0 |
| Ovarian ca. OVCAR-8 | 6.0 | 32.8 |
| Ovarian ca. IGROV-1 | 0.0 | 0.0 |
| Ovarian ca.* (ascites) SK-OV-3 | 8.8 | 0.0 |
| Uterus | 0.0 | 0.0 |
| Placenta | 38.7 | 27.9 |
| Prostate | 0.0 | 0.0 |
| Prostate ca.* (bone met)PC-3 | 0.0 | 6.5 |
| Testis | 34.9 | 14.9 |
| Melanoma Hs688(A).T | 0.0 | 0.0 |
| Melanoma* (met) Hs688(B).T | 0.0 | 0.0 |
| Melanoma UACC-62 | 0.0 | 32.8 |
| Melanoma M14 | 0.0 | 18.4 |
| Melanoma LOX IMVI | 0.0 | 0.0 |
| Melanoma* (met) SK-MEL-5 | 7.9 | 0.0 |
| Adipose | 0.0 | 0.0 |

[0773] TABLE OG
Panel 2.2

| | Rel. Exp. (%) | Rel. Exp. (%) |
|---|---|---|
| | Ag2609, Run | Ag2611, Run |
| Tissue Name | 175128270 | 175128271 |
| Normal Colon | 6.3 | 0.0 |
| Colon cancer (OD06064) | 0.0 | 0.0 |
| Colon Margin (OD06064) | 0.0 | 0.0 |
| Colon cancer (OD06159) | 0.0 | 0.0 |
| Colon Margin (OD06159) | 5.4 | 0.0 |
| Colon cancer (OD06297-04) | 0.0 | 0.0 |
| Colon Margin (OD06297-05) | 6.0 | 0.0 |
| CC Gr.2 ascend colon | 0.0 | 0.0 |
| (ODO3921) | | |
| CC Margin (ODO3921) | 0.0 | 0.0 |
| Colon cancer | 0.0 | 0.0 |
| metastasis (OD06104) | | |
| Lung Margin (OD06104) | 0.0 | 0.0 |
| Colon mets to lung | 0.0 | 0.0 |
| (OD04451-01) | | |
| Lung Margin (OD04451-02) | 0.0 | 0.0 |
| Normal Prostate | 0.0 | 0.0 |
| Prostate Cancer (OD04410) | 0.0 | 0.0 |
| Prostate Margin (OD04410) | 0.0 | 0.0 |
| Normal Ovary | 0.0 | 0.0 |
| Ovarian cancer (OD06283-03) | 0.0 | 0.0 |
| Ovarian Margin (OD06283-07) | 7.1 | 11.0 |
| Ovarian Cancer 064008 | 28.7 | 0.0 |
| Ovarian cancer (OD06145) | 0.0 | 5.6 |
| Ovarian Margin (OD06145) | 15.9 | 0.0 |
| Ovarian cancer (OD06455-03) | 6.8 | 0.0 |
| Ovarian Margin (OD06455-07) | 0.0 | 0.0 |
| Normal Lung | 0.0 | 0.0 |
| Invasive poor diff. | 0.0 | 0.0 |
| lung adeno (ODO4945-01 | | |
| Lung Margin (ODO4945-03) | 3.1 | 0.0 |
| Lung Malignant | 0.0 | 0.0 |
| Cancer (OD03126) | | |
| Lung Margin (OD03126) | 0.0 | 0.0 |
| Lung Cancer (OD05014A) | 0.0 | 0.0 |
| Lung Margin (OD05014B) | 0.0 | 4.3 |
| Lung cancer (OD06081) | 0.0 | 0.0 |
| Lung Margin (OD06081) | 0.0 | 8.0 |
| Lung Cancer (OD04237-01) | 0.0 | 0.0 |
| Lung Margin (OD04237-02) | 0.0 | 0.0 |
| Ocular Melanoma Metastasis | 0.0 | 10.3 |
| Ocular Melanoma | 0.0 | 0.0 |
| Margin (Liver) | | |
| Melanoma Metastasis | 16.5 | 15.2 |
| Melanoma Margin (Lung) | 0.0 | 0.0 |
| Normal Kidney | 7.4 | 11.0 |
| Kidney Ca, Nuclear | 4.3 | 0.0 |
| grade 2 (OD04338) | | |
| Kidney Margin (OD04338) | 0.0 | 2.8 |
| Kidney Ca Nuclear | 5.6 | 10.1 |
| grade 1/2 (OD04339) | | |
| Kidney Margin (OD04339) | 0.0 | 7.0 |
| Kidney Ca, Clear cell | 0.0 | 7.3 |
| type (OD04340) | | |
| Kidney Margin (OD04340) | 0.0 | 0.0 |
| Kidney Ca, Nuclear | 0.0 | 0.0 |
| grade 3 (OD04348) | | |
| Kidney Margin (OD04348) | 14.6 | 12.7 |
| Kidney malignant | 9.7 | 9.7 |
| cancer (OD06204B) | | |
| Kidney normal adjacent | 0.0 | 0.0 |
| tissue (OD06204E) | | |
| Kidney Cancer (OD04450-01) | 18.0 | 0.0 |
| Kidney Margin (OD04450-03) | 0.0 | 0.0 |
| Kidney Cancer 8120613 | 0.0 | 0.0 |
| Kidney Margin 8120614 | 0.0 | 0.0 |
| Kidney Cancer 9010320 | 0.0 | 0.0 |
| Kidney Margin 9010321 | 0.0 | 0.0 |
| Kidney Cancer 8120607 | 0.0 | 0.0 |
| Kidney Margin 8120608 | 0.0 | 0.0 |
| Normal Uterus | 9.8 | 14.5 |
| Uterine Cancer 064011 | 0.0 | 0.0 |
| Normal Thyroid | 0.0 | 0.0 |
| Thyroid Cancer 064010 | 0.0 | 0.0 |
| Thyroid Cancer A302152 | 0.0 | 15.1 |
| Thyroid Margin A302153 | 0.0 | 0.0 |
| Normal Breast | 18.7 | 33.9 |
| Breast Cancer (OD04566) | 0.0 | 0.0 |
| Breast Cancer 1024 | 21.2 | 17.7 |
| Breast Cancer (OD04590-01) | 0.0 | 0.0 |
| Breast Cancer Mets | 8.4 | 0.0 |
| (OD04590-03) | | |
| Breast Cancer Metastasis | 0.0 | 0.0 |
| (OD04655-05) | | |
| Breast Cancer 064006 | 1.5 | 9.9 |
| Breast Cancer 9100266 | 100.0 | 100.0 |
| Breast Margin 9100265 | 5.9 | 7.8 |
| Breast Cancer A209073 | 3.7 | 7.0 |
| Breast Margin A2090734 | 0.0 | 27.5 |
| Breast cancer (OD06083) | 9.9 | 14.3 |
| Breast cancer node | 13.5 | 5.3 |
| metastasis (OD06083) | | |
| Normal Liver | 0.0 | 0.0 |
| Liver Cancer 1026 | 0.0 | 0.0 |
| Liver Cancer 1025 | 0.0 | 0.0 |
| Liver Cancer 6004-T | 0.0 | 0.0 |
| Liver Tissue 6004-N | 0.0 | 0.0 |
| Liver Cancer 6005-T | 5.2 | 0.0 |
| Liver Tissue 6005-N | 0.0 | 0.0 |
| Liver Cancer 064003 | 0.0 | 0.0 |
| Normal Bladder | 0.0 | 0.0 |
| Bladder Cancer 1023 | 0.0 | 9.0 |
| Bladder Cancer A302173 | 10.2 | 0.0 |
| Normal Stomach | 12.3 | 0.0 |
| Gastric Cancer 9060397 | 0.0 | 0.0 |
| Stomach Margin 9060396 | 0.0 | 0.0 |
| Gastric Cancer 9060395 | 11.4 | 0.0 |
| Stomach Margin 9060394 | 0.0 | 0.0 |
| Gastric Cancer 064005 | 0.0 | 0.0 |

[0774] TABLE OH
Panel 4D

| | Rel. Exp. (%) | Rel. Exp. (%) | Rel. Exp. (%) |
|---|---|---|---|
| | Ag2609, Run | Ag2609, Run | Ag2611, Run |
| Tissue Name | 164289991 | 164347907 | 164398661 |
| Secondary Th1 act | 6.4 | 6.4 | 4.8 |
| Secondary Th2 act | 12.7 | 12.7 | 13.9 |
| Secondary Tr1 act | 0.9 | 0.9 | 14.7 |
| Secondary Th1 rest | 3.9 | 3.9 | 0.0 |
| Secondary Th2 rest | 0.0 | 0.0 | 0.0 |
| Secondary Tr1 rest | 0.4 | 0.4 | 0.0 |
| Primary Th1 act | 0.0 | 0.0 | 19.6 |
| Primary Th2 act | 9.2 | 9.2 | 0.0 |
| Primary Tr1 act | 4.2 | 4.2 | 7.1 |
| Primary Th1 rest | 16.8 | 16.8 | 20.4 |
| Primary Th2 rest | 13.6 | 13.6 | 15.0 |
| Primary Tr1 rest | 1.5 | 1.5 | 0.0 |
| CD45RA CD4 | 0.0 | 0.0 | 13.5 |
| lymphocyte act | | | |
| CD45RO CD4 | 0.2 | 0.2 | 1.3 |
| lymphocyte act | | | |
| CD8 lymphocyte act | 0.0 | 0.0 | 4.5 |
| Secondary CD8 | 13.5 | 13.5 | 4.5 |
| lymphocyte rest | | | |
| Secondary CD8 | 13.5 | 13.5 | 7.3 |
| lymphocyte act | | | |
| CD4 lymphocyte none | 10.2 | 10.2 | 10.5 |
| 2ry Th1/Th2/Tr1_{—} | 16.3 | 16.3 | 5.7 |
| anti-CD95 CH11 | | | |
| LAK cells rest | 17.1 | 17.1 | 6.3 |
| LAK cells IL-2 | 0.0 | 0.0 | 0.0 |
| LAK cells | 3.0 | 3.0 | 19.5 |
| IL-2 + IL-12 | | | |
| LAK cells IL-2 + IFN | 7.7 | 7.7 | 0.0 |
| gamma | | | |
| LAK cells IL-2 + | 4.1 | 4.1 | 0.0 |
| IL-18 | | | |
| LAK cells | 2.0 | 2.0 | 14.2 |
| PMA/ionomycin | | | |
| NK Cells IL-2 rest | 18.3 | 18.3 | 0.0 |
| Two Way MLR 3 day | 15.6 | 15.6 | 15.0 |
| Two Way MLR 5 day | 15.8 | 15.8 | 0.0 |
| Two Way MLR 7 day | 0.0 | 0.0 | 8.1 |
| PBMC rest | 1.6 | 1.6 | 0.0 |
| PBMC PWM | 10.2 | 10.2 | 14.2 |
| PBMC PHA-L | 6.7 | 6.7 | 20.9 |
| Ramos (B cell) none | 17.1 | 17.1 | 7.8 |
| Ramos (B cell) | 8.2 | 8.2 | 0.0 |
| ionomycin | | | |
| B lymphocytes PWM | 3.7 | 3.7 | 4.5 |
| B lymphocytes | 7.2 | 7.2 | 13.2 |
| CD40L and IL-4 | | | |
| EOL-1 dbcAMP | 9.4 | 9.4 | 2.1 |
| EOL-1 dbcAMP | 25.0 | 25.0 | 0.0 |
| PMA/ionomycin | | | |
| Dendritic cells none | 43.2 | 43.2 | 27.2 |
| Dendritic cells LPS | 17.6 | 17.6 | 11.3 |
| Dendritic cells | 24.1 | 24.1 | 5.6 |
| anti-CD40 | | | |
| Monocytes rest | 2.2 | 2.2 | 0.0 |
| Monocytes LPS | 69.3 | 69.3 | 100.0 |
| Macrophages rest | 100.0 | 100.0 | 97.3 |
| Macrophages LPS | 14.9 | 14.9 | 8.1 |
| HUVEC none | 0.0 | 0.0 | 0.0 |
| HUVEC starved | 4.7 | 4.7 | 19.1 |
| HUVEC IL-1beta | 0.0 | 0.0 | 0.0 |
| HUVEC IFN gamma | 4.9 | 4.9 | 0.0 |
| HUVEC TNF alpha + | 15.3 | 15.3 | 6.9 |
| IFN gamma | | | |
| HUVEC TNF | 18.4 | 18.4 | 0.0 |
| alpha + IL4 | | | |
| HUVEC IL-11 | 0.8 | 0.8 | 6.0 |
| Lung Microvascular | 6.5 | 6.5 | 66.0 |
| EC none | | | |
| Lung Microvascular | 9.5 | 9.5 | 18.3 |
| EC TNFalpha + | | | |
| IL-1beta | | | |
| Microvascular | 0.4 | 0.4 | 0.0 |
| Dermal EC none | | | |
| Microsvasular Dermal | 16.2 | 16.2 | 3.0 |
| EC TNFalpha + | | | |
| IL-1beta | | | |
| Bronchial epithelium | 1.3 | 1.3 | 6.3 |
| TNFalpha + | | | |
| IL1beta | | | |
| Small airway | 2.9 | 2.9 | 0.0 |
| epithelium none | | | |
| Small airway | 10.9 | 10.9 | 3.9 |
| epithelium | | | |
| TNFalpha + | | | |
| IL-1beta | | | |
| Coronery artery | 0.0 | 0.0 | 0.0 |
| SMC rest | | | |
| Coronery artery SMC | 0.4 | 0.4 | 5.9 |
| TNFalpha + | | | |
| IL-1beta | | | |
| Astrocytes rest | 9.9 | 9.9 | 0.0 |
| Astrocytes | 0.0 | 0.0 | 0.0 |
| TNFalpha + | | | |
| IL-1beta | | | |
| KU-812 (Basophil) | 3.1 | 3.1 | 4.0 |
| rest | | | |
| KU-812 (Basophil) | 3.9 | 3.9 | 4.8 |
| PMA/ionomycin | | | |
| CCD1106 | 9.6 | 9.6 | 0.0 |
| (Keratinocytes) none | | | |
| CCD1106 | 6.5 | 6.5 | 0.0 |
| (Keratinocytes) | | | |
| TNFalpha + | | | |
| IL-1beta | | | |
| Liver cirrhosis | 22.5 | 22.5 | 25.9 |
| Lupus kidney | 3.0 | 3.0 | 0.0 |
| NCI-H292 none | 4.4 | 4.4 | 0.0 |
| NCI-H292 IL-4 | 3.5 | 3.5 | 0.0 |
| NCI-H292 IL-9 | 1.5 | 1.5 | 0.0 |
| NCI-H292 IL-13 | 9.5 | 9.5 | 0.0 |
| NCI-H292 IFN gamma | 0.0 | 0.0 | 0.0 |
| HPAEC none | 0.0 | 0.0 | 0.0 |
| HPAEC TNF alpha + | 3.2 | 3.2 | 0.0 |
| IL-1 beta | | | |
| Lung fibroblast none | 4.1 | 4.1 | 0.0 |
| Lung fibroblast | 0.0 | 0.0 | 0.0 |
| TNF alpha + | | | |
| IL-1 beta | | | |
| Lung fibroblast IL-4 | 5.7 | 5.7 | 0.0 |
| Lung fibroblast IL-9 | 0.0 | 0.0 | 0.0 |
| Lung fibroblast IL-13 | 0.0 | 0.0 | 0.0 |
| Lung/fibroblast IFN | 0.0 | 0.0 | 0.0 |
| gamma | | | |
| Dermal fibroblast | 5.0 | 5.0 | 13.6 |
| CCD1070 rest | | | |
| Dermal fibroblast | 14.7 | 14.7 | 36.1 |
| CCD1070 TNF alpha | | | |
| Dermal fibroblast | 0.0 | 0.0 | 6.3 |
| CCD1070 IL-1 beta | | | |
| Dermal fibroblast | 0.0 | 0.0 | 0.0 |
| IFN gamma | | | |
| Dermal | 0.0 | 0.0 | 6.3 |
| fibroblast IL-4 | | | |
| IBD Colitis 2 | 9.3 | 9.3 | 0.0 |
| IBD Crohn's | 0.0 | 0.0 | 0.0 |
| Colon | 1.0 | 1.0 | 6.8 |
| Lung | 11.7 | 11.7 | 19.8 |
| Thymus | 19.3 | 19.3 | 20.2 |
| Kidney | 4.4 | 4.4 | 20.2 |

[0775] TABLE OI
Panel CNS_1

| | Rel.Exp. (%) |
|---|---|
| | Ag2609, Run |
| Tissue Name | 171664238 |
| BA4 Control | 0.0 |
| BA4 Control2 | 6.5 |
| BA4 Alzheimer's2 | 6.6 |
| BA4 Parkinson's | 7.2 |
| BA4 Parkinson's2 | 0.0 |
| BA4 Huntington's | 14.7 |
| BA4 Huntington's2 | 0.0 |
| BA4 PSP | 6.0 |
| BA4 PSP2 | 8.5 |
| BA4 Depression | 12.2 |
| BA4 Depression2 | 5.1 |
| BA7 Control | 18.6 |
| BA7 Control2 | 0.0 |
| BA7 Alzheimer's2 | 5.6 |
| BA7 Parkinson's | 3.7 |
| BA7 Parkinson's2 | 0.0 |
| BA7 Huntington's | 8.8 |
| BA7 Huntington's2 | 9.5 |
| BA7 PSP | 15.0 |
| BA7 PSP2 | 0.0 |
| BA7 Depression | 9.1 |
| BA9 Control | 5.9 |
| BA9 Control2 | 10.6 |
| BA9 Alzheimer's | 0.0 |
| BA9 Alzheimer's2 | 0.0 |
| BA9 Parkinson's | 18.8 |
| BA9 Parkinson's2 | 5.4 |
| BA9 Huntington's | 11.6 |
| BA9 Huntington's2 | 0.0 |
| BA9 PSP | 3.3 |
| BA9 PSP2 | 0.0 |
| BA9 Depression | 4.8 |
| BA9 Depression2 | 0.0 |
| BA17 Control | 9.6 |
| BA17 Control2 | 8.4 |
| BA17 Alzheimer's2 | 0.0 |
| BA17 Parkinson's | 18.4 |
| BA17 Parkinson's2 | 20.4 |
| BA17 Huntington's | 17.9 |
| BA17 Huntington's2 | 0.0 |
| BA17 Depression | 12.2 |
| BA17 Depression2 | 8.5 |
| BA17 PSP | 7.2 |
| BA17 PSP2 | 0.0 |
| Sub Nigra Control | 49.3 |
| Sub Nigra Control2 | 37.1 |
| Sub Nigra Alzheimer's2 | 6.6 |
| Sub Nigra Parkinson's2 | 19.1 |
| Sub Nigra Huntington's | 100.0 |
| Sub Nigra Huntington's2 | 7.0 |
| Sub Nigra PSP2 | 4.5 |
| Sub Nigra Depression | 0.0 |
| Sub Nigra Depression2 | 4.8 |
| Glob Palladus Control | 9.5 |
| Glob Palladus Control2 | 6.4 |
| Glob Palladus Alzheimer's | 4.8 |
| Glob Palladus Alzheimer's2 | 13.6 |
| Glob Palladus Parkinson's | 38.2 |
| Glob Palladus Parkinson's2 | 11.9 |
| Glob Palladus PSP | 0.0 |
| Glob Palladus PSP2 | 0.0 |
| Glob Palladus Depression | 23.5 |
| Temp Pole Control | 0.0 |
| Temp Pole Control2 | 0.0 |
| Temp Pole Alzheimer's | 0.0 |
| Temp Pole Alzheimer's2 | 0.0 |
| Temp Pole Parkinson's | 0.0 |
| Temp Pole Parkinson's2 | 3.2 |
| Temp Pole Huntington's | 0.0 |
| Temp Pole PSP | 0.0 |
| Temp Pole PSP2 | 0.0 |
| Temp Pole Depression2 | 0.0 |
| Cing Gyr Control | 17.9 |
| Cing Gyr Control2 | 9.3 |
| Cing Gyr Alzheimer's | 11.9 |
| Cing Gyr Alzheimer's2 | 0.0 |
| Cing Gyr Parkinson's | 38.4 |
| Cing Gyr Parkinson's2 | 11.8 |
| Cing Gyr Huntington's | 29.1 |
| Cing Gyr Huntington's2 | 25.5 |
| Cing Gyr PSP | 33.7 |
| Cing Gyr PSP2 | 13.7 |
| Cing Gyr Depression | 17.8 |
| Cing Gyr Depression2 | 19.8 |

[0776] CNS_neurodegeneration_v1.0 Summary: Ag2611/Ag2609 This gene is expressed more highly in the temporal cortex of Alzheimer's diseased brain than in control brain without amyloid plaques, which are diagnostic and potentially causative of Alzheimer's disease. This gene encodes a protein with homology to GPCRs. GPCRs are readily targetable with drugs, and regulate many specific brain processes, including signaling processes, that are currently the target of FDA-approved pharmaceuticals that treat Alzheimer's disease, such as the cholinergic system. The major mechanisms proposed for AbetaP-induced cytotoxicity involve the loss of Ca2+ homeostasis and the generation of reactive oxygen species (ROS). The changes in Ca2+ homeostasis could be the result of changes in G-protein-driven releases of second messengers. Thus, targeting this class of molecule can have therapeutic potential in Alzheimer's disease treatment. In particular, the increased gene expression in brains affected by Alzheimer's indicates potential therapeutic value to drugs that target this GPCR.

[0777] See Kourie J I. Mechanisms of amyloid beta protein-induced modification in ion transport systems: implications for neurodegenerative diseases. Cell Mol Neurobiol June 2001;21(3):173-213

[0778] Panel 1.2 Summary: Ag1500 Highest expression of this gene is seen in the cerebral cortex (CT=30.4). Among tissues active in the central nervous system, this gene is also moderately expressed in the cerebellum, hippocampus, thalamus and spinal cord. Please see CNS_neurodegeneration_panel_v1.0 summary for description of the potential role of this gene in the treatment of CNS diseases.

[0779] Among tissues with metabolic function, this gene is expressed at low but significant levels in samples derived from the adrenal gland, heart and skeletal muscle. Therefore, the protein encoded by this gene may be important in the pathogenesis and/or treatment of disease in any or all of the above-named tissues.

[0780] This gene also shows an association with cancerous cell lines and is expressed in clusters of samples derived from breast, ovarian, melanoma and lung cancer cell lines. Thus, the expression of this gene could be used to distinguish samples derived from cell lines when compared to tissues. In addition, therapeutic modulation of this gene or its protein product, through the use of small molecule drugs or antibodies, might be beneficial in the treatment of ovarian cancer, breast cancer, lung cancer or melanoma.

[0781] Panel 1.3D Summary: Ag2611/Ag2609 Two experiments with two different probe/primer sets both show preferential expression of this gene in tissues originating in the central nervous system, with expression seen in the spinal cord (CT=33.1) and thalamus (CT=34.1). Please see CNS_neurodegeneration_panel_v1.0 summary for description of the potential role of this gene in the treatment of CNS diseases.

[0782] Panel 2.2 Summary: Ag2611/Ag2609 In two experiments using two different probe and primer sets, expression of this gene is limited to a sample derived from a breast cancer (CT=33.2) and appears to be overexpressed in breast cancer as compared to normal adjacent tissue. This suggests that this gene could be used to distinguish breast cancer samples from other samples and for the detection of breast cancer. Moreover, therapeutic inhibition of this gene, through the use of small molecule drugs or antibodies might be of use in the treatment of breast cancer.

[0783] Panel 4D Summary: Ag2611/Ag2609 This gene is expressed at moderate levels in LPS-activated monocytes but not in resting monocytes. Conversely, this gene is expressed at moderate levels in resting macrophages, but at low levels in activated macrophages. This pattern is evident in experiments using two different probe and primer sets that match this sequence. Since circulating monocytes and tissue macrophages are both developmentally related cell types, this gene could serve as a useful target for the development of small molecule drugs as well as therapeutic antibodies. Therapeutic antibodies and small molecule inhibitors that block the function of the protein encoded by this gene may be useful in reducing inflammation and autoimmune disease symptoms in patients with Crohn's disease, inflammatory bowel disease, asthma, psoriasis, and rheumatoid arthritis.

[0784] Panel CNS_{—}1 Summary: Ag2609 Expression of this gene is highest in the substantia nigra of a Huntington's disease patient, indicating that this gene may participate in the genetic dysregulation associated with the neurodegeneration that occurs in this brain region. The substantia nigra is also critical to the progression of Parkinson's disease neurodegeneration. Thus, pharmacological targeting of the GPCR encoded by this gene may help counter this genetic dysregulation and contribute to the restoration of normal function in Huntington's disease as well as potentially Parkinson's disease patients. Pharmacological modulation of GPCR signaling systems is the mechanism by which powerful depression therapies, such as SSRIs, exert their effect.

[0785] P. CG55838-02 and CG55838-03: Dual Specificity Mitogen-Activated Protein Kinase Kinase 2.

[0786] Expression of gene CG55838-02 and CG55838-03 was assessed using the primer-probe sets Ag2022 and Ag7706, described in Tables PA and PB. Results of the RTQ-PCR runs are shown in Tables PC, PD, PE, PF, PG and PH. Please note that primer probe Ag7706 is specific for CG55838-03. Also, please note that CG55838-03 represents a full-length physical clone.

TABLE PA
Probe Name Ag2022

| | | | Start | SEQ |
|---|---|---|---|---|
| Primers | Sequences | Length | Position | ID No |
| Forward | 5′-ccaggagtttgtcaataaatgc-3′ | 22 | 760 | 205 |
| Probe | TET-5′-ctcatcaagaacccagcggagcg-3′-TAMRA | 23 | 782 | 206 |
| Reverse | 5′-ttgatgaaggtgtggtttgtg-3′ | 21 | 823 | 207 |

[0787] TABLE PB
Probe Name Ag7706

| | | | Start | SEQ |
|---|---|---|---|---|
| Primers | Sequences | Length | Position | ID No |
| Forward | 5′-ctacatggctccacctcctaa-3′ | 21 | 709 | 208 |
| Probe | TET-5′-ccccgacttccaggagtttgtca-3′-TAMRA | 23 | 751 | 209 |
| Reverse | 5′-tgggttcttgatgaggcatt-3′ | 20 | 777 | 210 |

[0788] TABLE PC
General_screening_panel_v1.7

| | Rel.Exp. (%) |
|---|---|
| | Ag7706, Run |
| Tissue Name | 318841791 |
| Adipose | 13.0 |
| HUVEC | 40.9 |
| Melanoma* Hs688(A).T | 0.0 |
| Melanoma* Hs688(B).T | 31.6 |
| Melanoma (met) SK-MEL-5 | 25.3 |
| Testis | 8.9 |
| Prostate ca. (bone met) PC-3 | 1.0 |
| Prostate ca. DU145 | 22.7 |
| Prostate pool | 2.8 |
| Uterus pool | 0.6 |
| Ovarian ca. OVCAR-3 | 10.6 |
| Ovarian ca. (ascites) SK-OV-3 | 0.8 |
| Ovarian ca. OVCAR-4 | 61.1 |
| Ovarian ca. OVCAR-5 | 24.8 |
| Ovarian ca. IGROV-1 | 100.0 |
| Ovarian ca. OVCAR-8 | 46.7 |
| Ovary | 9.0 |
| Breast ca. MCF-7 | 29.1 |
| Breast ca. MDA-MB-231 | 62.4 |
| Breast ca. BT-549 | 15.0 |
| Breast ca. T47D | 11.6 |
| Breast pool | 0.0 |
| Trachea | 10.7 |
| Lung | 10.9 |
| Fetal Lung | 12.1 |
| Lung ca. NCI-N417 | 13.7 |
| Lung ca. LX-1 | 5.9 |
| Lung ca. NCI-H146 | 15.9 |
| Lung ca. SHP-77 | 63.3 |
| Lung ca. NCI-H23 | 71.2 |
| Lung ca. NCI-H460 | 31.4 |
| Lung ca. HOP-62 | 30.6 |
| Lung ca. NCI-H522 | 41.8 |
| Lung ca. DMS-114 | 6.9 |
| Liver | 2.6 |
| Fetal Liver | 10.2 |
| Kidney pool | 15.7 |
| Fetal Kidney | 12.8 |
| Renal ca. 786-0 | 42.0 |
| Renal ca. A498 | 9.3 |
| Renal ca. ACHN | 14.9 |
| Renal ca. UO-31 | 14.3 |
| Renal ca. TK-10 | 22.7 |
| Bladder | 6.8 |
| Gastric ca. (liver met.) NCI-N87 | 0.5 |
| Stomach | 0.7 |
| Colon ca. SW-948 | 11.8 |
| Colon ca. SW480 | 2.7 |
| Colon ca. (SW480 met) SW620 | 37.6 |
| Colon ca. HT29 | 46.7 |
| Colon ca. HCT-116 | 42.9 |
| Colon cancer tissue | 0.9 |
| Colon ca. SW1116 | 8.2 |
| Colon ca. Colo-205 | 5.6 |
| Colon ca. SW-48 | 7.9 |
| Colon | 12.6 |
| Small Intestine | 2.0 |
| Fetal Heart | 15.3 |
| Heart | 2.0 |
| Lymph Node pool 1 | 2.3 |
| Lymph Node pool 2 | 20.6 |
| Fetal Skeletal Muscle | 16.8 |
| Skeletal Muscle pool | 3.3 |
| Skeletal Muscle | 43.2 |
| Spleen | 4.6 |
| Thymus | 4.9 |
| CNS cancer (glio/astro) SF-268 | 19.6 |
| CNS cancer (glio/astro) T98G | 12.2 |
| CNS cancer (neuro; met) SK-N-AS | 1.2 |
| CNS cancer (astro) SF-539 | 32.3 |
| CNS cancer (astro) SNB-75 | 54.7 |
| CNS cancer (glio) SNB-19 | 55.5 |
| CNS cancer (glio) SF-295 | 12.2 |
| Brain (Amygdala) | 12.9 |
| Brain (Cerebellum) | 35.8 |
| Brain (Fetal) | 44.1 |
| Brain (Hippocampus) | 9.7 |
| Cerebral Cortex pool | 11.4 |
| Brain (Substantia nigra) | 6.5 |
| Brain (Thalamus) | 11.0 |
| Brain (Whole) | 30.8 |
| Spinal Cord | 5.0 |
| Adrenal Gland | 16.5 |
| Pituitary Gland | 8.5 |
| Salivary Gland | 6.3 |
| Thyroid | 10.5 |
| Pancreatic ca. PANC-1 | 14.1 |
| Pancreas pool | 2.6 |

[0789] TABLE PD
Panel 1.3D

| | Rel. Exp. (%) | Rel. Exp. (%) |
|---|---|---|
| | Ag2022, Run | Ag2022, Run |
| Tissue Name | 165626371 | 165627116 |
| Liver adenocarcinoma | 23.2 | 15.8 |
| Pancreas | 9.6 | 4.3 |
| Pancreatic ca. CAPAN2 | 4.1 | 4.4 |
| Adrenal gland | 8.0 | 10.3 |
| Thyroid | 12.1 | 9.6 |
| Salivary gland | 10.9 | 5.9 |
| Pituitary gland | 12.0 | 9.6 |
| Brain (fetal) | 13.6 | 7.6 |
| Brain (whole) | 47.3 | 25.0 |
| Brain (amygdala) | 33.7 | 19.9 |
| Brain (cerebellum) | 33.2 | 16.3 |
| Brain (hippocampus) | 42.6 | 21.6 |
| Brain (Substantia nigra) | 30.6 | 13.8 |
| Brain (thalamus) | 50.3 | 24.5 |
| Cerebral Cortex | 36.6 | 31.4 |
| Spinal cord | 16.8 | 8.7 |
| glio/astro U87-MG | 17.6 | 18.4 |
| glio/astro U-118-MG | 54.7 | 38.4 |
| astrocytoma SW1783 | 13.5 | 12.8 |
| neuro*; met SK-N-AS | 15.4 | 12.9 |
| astrocytoma SF-539 | 14.3 | 9.4 |
| astrocytoma SNB-75 | 29.5 | 25.7 |
| glioma SNB-19 | 23.7 | 17.8 |
| glioma U251 | 38.4 | 34.4 |
| glioma SF-295 | 18.4 | 17.2 |
| Heart (fetal) | 17.2 | 16.3 |
| Heart | 25.7 | 10.2 |
| Skeletal muscle (fetal) | 12.2 | 12.9 |
| Skeletal muscle | 100.0 | 100.0 |
| Bone marrow | 15.0 | 14.5 |
| Thymus | 7.6 | 8.1 |
| Spleen | 14.5 | 11.4 |
| Lymph node | 25.7 | 19.2 |
| Colorectal | 6.7 | 4.7 |
| Stomach | 14.5 | 10.0 |
| Small intestine | 30.1 | 32.3 |
| Colon ca. SW480 | 9.2 | 6.7 |
| Colon ca.* SW620(SW480 met) | 3.1 | 4.1 |
| Colon ca. HT29 | 1.4 | 2.5 |
| Colon ca. HCT-116 | 8.5 | 9.1 |
| Colon ca. CaCo-2 | 5.6 | 7.0 |
| Colon ca. tissue(ODO3866) | 11.8 | 11.5 |
| Colon ca. HCC-2998 | 4.6 | 7.2 |
| Gastric ca.* (liver met) NCI-N87 | 13.0 | 9.3 |
| Bladder | 3.4 | 4.2 |
| Trachea | 13.7 | 10.4 |
| Kidney | 14.6 | 6.3 |
| Kidney (fetal) | 9.2 | 4.2 |
| Renal ca. 786-0 | 9.5 | 7.3 |
| Renal ca. A498 | 23.2 | 19.3 |
| Renal ca. RXF 393 | 16.8 | 15.9 |
| Renal ca. ACHN | 14.4 | 10.5 |
| Renal ca. UO-31 | 11.2 | 8.1 |
| Renal ca. TK-10 | 5.4 | 4.8 |
| Liver | 11.2 | 3.4 |
| Liver (fetal) | 24.1 | 18.7 |
| Liver ca. | 12.8 | 9.9 |
| (hepatoblast) HepG2 | | |
| Lung | 11.4 | 11.8 |
| Lung (fetal) | 11.8 | 8.9 |
| Lung ca. (small cell) LX-1 | 12.4 | 8.4 |
| Lung ca. (small cell) NCI-H69 | 15.8 | 17.0 |
| Lung ca. (s. cell var.) SHP-77 | 11.3 | 12.6 |
| Lung ca. (large cell)NCI-H460 | 30.6 | 28.3 |
| Lung ca. (non-sm. cell) A549 | 5.7 | 6.2 |
| Lung ca. (non-s. cell) NCI-H23 | 6.3 | 7.0 |
| Lung ca. (non-s. cell) HOP-62 | 13.1 | 12.0 |
| Lung ca. (non-s. cl) NCI-H522 | 5.7 | 4.5 |
| Lung ca. (squam.) SW 900 | 3.6 | 4.1 |
| Lung ca. (squam.) NCI-H596 | 12.2 | 11.0 |
| Mammary gland | 7.2 | 8.8 |
| Breast ca.* (pl. ef) MCF-7 | 9.6 | 9.1 |
| Breast ca.* (pl. ef) MDA-MB-231 | 47.0 | 56.6 |
| Breast ca.* (pl. ef) T47D | 4.7 | 4.6 |
| Breast ca. BT-549 | 19.6 | 20.6 |
| Breast ca. MDA-N | 6.3 | 6.2 |
| Ovary | 7.3 | 6.4 |
| Ovarian ca. OVCAR-3 | 7.4 | 5.6 |
| Ovarian ca. OVCAR-4 | 27.9 | 20.6 |
| Ovarian ca. OVCAR-5 | 7.0 | 7.0 |
| Ovarian ca. OVCAR-8 | 11.7 | 9.8 |
| Ovarian ca. IGROV-1 | 3.5 | 2.3 |
| Ovarian ca.* (ascites) SK-OV-3 | 23.7 | 17.0 |
| Uterus | 25.9 | 18.7 |
| Placenta | 10.9 | 6.3 |
| Prostate | 10.5 | 10.4 |
| Prostate ca.* (bone met)PC-3 | 20.4 | 18.0 |
| Testis | 27.2 | 19.3 |
| Melanoma Hs688(A).T | 6.6 | 5.1 |
| Melanoma* (met) Hs688(B).T | 10.7 | 8.5 |
| Melanoma UACC-62 | 43.5 | 36.1 |
| Melanoma M14 | 42.0 | 36.9 |
| Melanoma LOX IMVI | 8.0 | 9.0 |
| Melanoma* (met) SK-MEL-5 | 15.9 | 14.2 |
| Adipose | 4.8 | 3.8 |

[0790] TABLE PE
Panel 2.2

| | Rel.Exp. (%) |
|---|---|
| | Ag2022, Run |
| Tissue Name | 174232815 |
| Normal Colon | 24.7 |
| Colon cancer (OD06064) | 14.4 |
| Colon Margin (OD06064) | 18.0 |
| Colon cancer (OD06159) | 12.2 |
| Colon Margin (OD06159) | 18.2 |
| Colon cancer (OD06297-04) | 15.5 |
| Colon Margin (OD06297-05) | 23.7 |
| CC Gr.2 ascend colon (ODO3921) | 25.7 |
| CC Margin (ODO3921) | 21.9 |
| Colon cancer metastasis (OD06104) | 6.0 |
| Lung Margin (OD06104) | 19.6 |
| Colon mets to lung (OD04451-01) | 30.1 |
| Lung Margin (OD04451-02) | 11.4 |
| Normal Prostate | 21.9 |
| Prostate Cancer (OD04410) | 9.1 |
| Prostate Margin (OD04410) | 11.2 |
| Normal Ovary | 58.2 |
| Ovarian cancer (OD06283-03) | 12.9 |
| Ovarian Margin (OD06283-07) | 8.5 |
| Ovarian Cancer 064008 | 15.8 |
| Ovarian cancer (OD06145) | 19.2 |
| Ovarian Margin (OD06145) | 34.4 |
| Ovarian cancer (OD06455-03) | 11.0 |
| Ovarian Margin (OD06455-07) | 2.8 |
| Normal Lung | 11.3 |
| Invasive poor diff. lung adeno (ODO4945-01 | 19.1 |
| Lung Margin (ODO4945-03) | 9.9 |
| Lung Malignant Cancer (OD03126) | 22.4 |
| Lung Margin (OD03126) | 8.6 |
| Lung Cancer (OD05014A) | 24.5 |
| Lung Margin (OD05014B) | 13.8 |
| Lung cancer (OD06081) | 12.4 |
| Lung Margin (OD06081) | 2.6 |
| Lung Cancer (OD04237-01) | 14.5 |
| Lung Margin (OD04237-02) | 29.7 |
| Ocular Melanoma Metastasis | 44.4 |
| Ocular Melanoma Margin (Liver) | 12.2 |
| Melanoma Metastasis | 32.5 |
| Melanoma Margin (Lung) | 13.2 |
| Normal Kidney | 14.9 |
| Kidney Ca, Nuclear grade 2 (OD04338) | 40.9 |
| Kidney Margin (OD04338) | 12.3 |
| Kidney Ca Nuclear grade 1/2 (OD04339) | 49.3 |
| Kidney Margin (OD04339) | 17.9 |
| Kidney Ca, Clear cell type (OD04340) | 21.0 |
| Kidney Margin (OD04340) | 18.0 |
| Kidney Ca, Nuclear grade 3 (OD04348) | 16.6 |
| Kidney Margin (OD04348) | 70.7 |
| Kidney malignant cancer (OD06204B) | 22.1 |
| Kidney normal adjacent tissue (OD06204E) | 18.7 |
| Kidney Cancer (OD04450-01) | 48.3 |
| Kidney Margin (OD04450-03) | 16.6 |
| Kidney Cancer 8120613 | 14.1 |
| Kidney Margin 8120614 | 40.6 |
| Kidney Cancer 9010320 | 20.4 |
| Kidney Margin 9010321 | 12.9 |
| Kidney Cancer 8120607 | 48.0 |
| Kidney Margin 8120608 | 37.9 |
| Normal Uterus | 11.9 |
| Uterine Cancer 064011 | 16.7 |
| Normal Thyroid | 9.7 |
| Thyroid Cancer 064010 | 19.1 |
| Thyroid Cancer A302152 | 28.3 |
| Thyroid Margin A302153 | 11.8 |
| Normal Breast | 12.3 |
| Breast Cancer (OD04566) | 12.9 |
| Breast Cancer 1024 | 23.2 |
| Breast Cancer (OD04590-01) | 46.0 |
| Breast Cancer Mets (OD04590-03) | 35.6 |
| Breast Cancer Metastasis (OD04655-05) | 100.0 |
| Breast Cancer 064006 | 19.3 |
| Breast Cancer 9100266 | 8.3 |
| Breast Margin 9100265 | 9.3 |
| Breast Cancer A209073 | 3.6 |
| Breast Margin A2090734 | 22.1 |
| Breast cancer (OD06083) | 47.3 |
| Breast cancer node metastasis (OD06083) | 49.0 |
| Normal Liver | 29.3 |
| Liver Cancer 1026 | 31.2 |
| Liver Cancer 1025 | 39.2 |
| Liver Cancer 6004-T | 36.1 |
| Liver Tissue 6004-N | 8.1 |
| Liver Cancer 6005-T | 74.2 |
| Liver Tissue 6005-N | 74.2 |
| Liver Cancer 064003 | 45.7 |
| Normal Bladder | 19.3 |
| Bladder Cancer 1023 | 29.9 |
| Bladder Cancer A302173 | 31.0 |
| Normal Stomach | 48.6 |
| Gastric Cancer 9060397 | 16.5 |
| Stomach Margin 9060396 | 33.2 |
| Gastric Cancer 9060395 | 14.6 |
| Stomach Margin 9060394 | 34.4 |
| Gastric Cancer 064005 | 25.3 |

[0791] TABLE PF
Panel 4.1D

| | Rel.Exp. (%) |
|---|---|
| | Ag7706, Run |
| Tissue Name | 311582896 |
| Secondary Th1 act | 56.3 |
| Secondary Th2 act | 66.9 |
| Secondary Tr1 act | 14.3 |
| Secondary Th1 rest | 5.5 |
| Secondary Th2 rest | 14.9 |
| Secondary Tr1 rest | 15.2 |
| Primary Th1 act | 14.8 |
| Primary Th2 act | 41.2 |
| Primary Tr1 act | 45.7 |
| Primary Th1 rest | 4.8 |
| Primary Th2 rest | 14.8 |
| Primary Tr1 rest | 0.0 |
| CD45RA CD4 lymphocyte act | 43.2 |
| CD45RO CD4 lymphocyte act | 39.0 |
| CD8 lymphocyte act | 12.9 |
| Secondary CD8 lymphocyte rest | 4.5 |
| Secondary CD8 lymphocyte act | 9.7 |
| CD4 lymphocyte none | 5.2 |
| 2ry Th1/Th2/Tr1 anti-CD95 CH11 | 15.5 |
| LAK cells rest | 12.9 |
| LAK cells IL-2 | 15.1 |
| LAK cells IL-2 + IL-12 | 0.0 |
| LAK cells IL-2 + IFN gamma | 7.4 |
| LAK cells IL-2 + IL-18 | 2.5 |
| LAK cells PMA/ionomycin | 12.0 |
| NK Cells IL-2 rest | 47.0 |
| Two Way MLR 3 day | 7.9 |
| Two Way MLR 5 day | 0.0 |
| Two Way MLR 7 day | 0.0 |
| PBMC rest | 0.0 |
| PBMC PWM | 11.0 |
| PBMC PHA-L | 2.8 |
| Ramos (B cell) none | 15.0 |
| Ramos (B cell) ionomycin | 61.1 |
| B lymphocytes PWM | 15.4 |
| B lymphocytes CD40L and IL-4 | 50.0 |
| EOL-1 dbcAMP | 67.8 |
| EOL-1 dbcAMP PMA/ionomycin | 23.0 |
| Dendritic cells none | 67.8 |
| Dendritic cells LPS | 2.0 |
| Dendritic cells anti-CD40 | 0.0 |
| Monocytes rest | 7.5 |
| Monocytes LPS | 22.2 |
| Macrophages rest | 4.1 |
| Macrophages LPS | 13.5 |
| HUVEC none | 48.0 |
| HUVEC starved | 49.7 |
| HUVEC IL-1beta | 54.3 |
| HUVEC IFN gamma | 62.4 |
| HUVEC TNF alpha + IFN gamma | 15.4 |
| HUVEC TNF alpha + IL4 | 24.0 |
| HUVEC IL-11 | 35.1 |
| Lung Microvascular EC none | 100.0 |
| Lung Microvascular EC TNFalpha + IL-1beta | 24.5 |
| Microvascular Dermal EC none | 18.0 |
| Microsvasular Dermal EC TNFalpha + IL-1beta | 20.0 |
| Bronchial epithelium TNFalpha + IL1beta | 31.2 |
| Small airway epithelium none | 7.2 |
| Small airway epithelium TNFalpha + IL-1beta | 49.0 |
| Coronery artery SMC rest | 54.3 |
| Coronery artery SMC TNFalpha + IL-1beta | 41.5 |
| Astrocytes rest | 20.4 |
| Astrocytes TNFalpha + IL-1beta | 14.1 |
| KU-812 (Basophil) rest | 96.6 |
| KU-812 (Basophil) PMA/ionomycin | 55.5 |
| CCD1106 (Keratinocytes) none | 49.3 |
| CCD1106 (Keratinocytes) TNFalpha + IL-1beta | 7.6 |
| Liver cirrhosis | 1.9 |
| NCI-H292 none | 17.2 |
| NCI-H292 IL-4 | 21.9 |
| NCI-H292 IL-9 | 33.0 |
| NCI-H292 IL-13 | 24.5 |
| NCI-H292 IFN gamma | 29.1 |
| HPAEC none | 15.1 |
| HPAEC TNF alpha + IL-1 beta | 39.2 |
| Lung fibroblast none | 54.7 |
| Lung fibroblast TNF alpha + IL-1 beta | 64.2 |
| Lung fibroblast IL-4 | 32.1 |
| Lung fibroblast IL-9 | 37.4 |
| Lung fibroblast IL-13 | 37.4 |
| Lung fibroblast IFN gamma | 61.1 |
| Dermal fibroblast CCD1070 rest | 66.4 |
| Dermal fibroblast CCD1070 TNF alpha | 77.4 |
| Dermal fibroblast CCD1070 IL-1 beta | 44.4 |
| Dermal fibroblast IFN gamma | 20.3 |
| Dermal fibroblast IL-4 | 74.7 |
| Dermal Fibroblasts rest | 20.3 |
| Neutrophils TNFa + LPS | 4.0 |
| Neutrophils rest | 0.0 |
| Colon | 0.0 |
| Lung | 0.0 |
| Thymus | 6.0 |
| Kidney | 16.8 |

[0792] TABLE PG
Panel 4D

| | Rel.Exp. (%) |
|---|---|
| | Ag2022, Run |
| Tissue Name | 160996807 |
| Secondary Th1 act | 21.3 |
| Secondary Th2 act | 16.3 |
| Secondary Tr1 act | 0.0 |
| Secondary Th1 rest | 5.2 |
| Secondary Th2 rest | 6.7 |
| Secondary Tr1 rest | 6.3 |
| Primary Th1 act | 15.6 |
| Primary Th2 act | 12.9 |
| Primary Tr1 act | 20.2 |
| Primary Th1 rest | 23.2 |
| Primary Th2 rest | 11.4 |
| Primary Tr1 rest | 1.6 |
| CD45RA CD4 lymphocyte act | 12.7 |
| CD45RO CD4 lymphocyte act | 11.4 |
| CD8 lymphocyte act | 12.4 |
| Secondary CD8 lymphocyte rest | 12.0 |
| Secondary CD8 lymphocyte act | 11.4 |
| CD4 lymphocyte none | 3.2 |
| 2ry Th1/Th2/Tr1 anti-CD95 CH11 | 9.0 |
| LAK cells rest | 10.6 |
| LAK cells IL-2 | 12.8 |
| LAK cells IL-2 + IL-12 | 9.3 |
| LAK cells IL-2 + IFN gamma | 11.3 |
| LAK cells IL-2 + IL-18 | 9.3 |
| LAK cells PMA/ionomycin | 5.8 |
| NK Cells IL-2 rest | 9.7 |
| Two Way MLR 3 day | 9.2 |
| Two Way MLR 5 day | 11.5 |
| Two Way MLR 7 day | 7.5 |
| PBMC rest | 3.9 |
| PBMC PWM | 24.7 |
| PBMC PHA-L | 12.6 |
| Ramos (B cell) none | 13.6 |
| Ramos (B cell) ionomycin | 32.3 |
| B lymphocytes PWM | 50.0 |
| B lymphocytes CD40L and IL-4 | 25.5 |
| EOL-1 dbcAMP | 18.0 |
| EOL-1 dbcAMP PMA/ionomycin | 27.5 |
| Dendritic cells none | 10.1 |
| Dendritic cells LPS | 6.9 |
| Dendritic cells anti-CD40 | 9.0 |
| Monocytes rest | 11.1 |
| Monocytes LPS | 7.0 |
| Macrophages rest | 12.5 |
| Macrophages LPS | 5.9 |
| HUVEC none | 22.2 |
| HUVEC started | 22.4 |
| HUVEC IL-1beta | 3.8 |
| HUVEC IFN gamma | 15.3 |
| HUVEC TNF alpha + IFN gamma | 13.4 |
| HUVEC TNF alpha + IL4 | 13.7 |
| HUVEC IL-11 | 13.8 |
| Lung Microvascular EC none | 14.9 |
| Lung Microvascular EC TNFalpha + IL-1beta | 18.0 |
| Microvascular Dermal EC none | 22.2 |
| Microsvasular Dermal EC TNFalpha + IL-1 beta | 18.8 |
| Bronchial epithelium TNFalpha + IL1beta | 5.8 |
| Small airway epithelium none | 6.9 |
| Small airway epithelium TNFalpha + IL-1beta | 25.2 |
| Coronery artery SMC rest | 18.6 |
| Coronery artery SMC TNFalpha + IL-1beta | 14.0 |
| Astrocytes rest | 12.6 |
| Astrocytes TNFalpha + IL-1beta | 15.5 |
| KU-812 (Basophil) rest | 58.6 |
| KU-812 (Basophil) PMA/ionomycin | 100.0 |
| CCD1106 (Keratinocytes) none | 14.3 |
| CCD1106 (Keratinocytes) TNFalpha + IL-1beta | 1.7 |
| Liver cirrhosis | 1.6 |
| Lupus kidney | 1.4 |
| NCI-H292 none | 19.9 |
| NCI-H292 IL-4 | 20.4 |
| NCI-H292 IL-9 | 22.4 |
| NCI-H292 IL-13 | 12.6 |
| NCI-H292 IFN gamma | 12.9 |
| HPAEC none | 16.4 |
| HPAEC TNF alpha + IL-1 beta | 17.6 |
| Lung fibroblast none | 23.0 |
| Lung fibroblast TNF alpha + IL-1 beta | 14.3 |
| Lung fibroblast IL-4 | 30.8 |
| Lung fibroblast IL-9 | 27.2 |
| Lung fibroblast IL-13 | 19.6 |
| Lung fibroblast IFN gamma | 27.5 |
| Dermal fibroblast CCD1070 rest | 24.7 |
| Dermal fibroblast CCD1070 TNF alpha | 47.3 |
| Dermal fibroblast CCD1070 IL-1 beta | 21.5 |
| Dermal fibroblast IFN gamma | 12.5 |
| Dermal fibroblast IL-4 | 22.5 |
| IBD Colitis 2 | 0.8 |
| IBD Crohn's | 1.3 |
| Colon | 13.8 |
| Lung | 8.6 |
| Thymus | 9.9 |
| Kidney | 18.7 |

[0793] TABLE PH
Panel 5 Islet

| | Rel.Exp. (%) |
|---|---|
| | Ag2022, Run |
| Tissue Name | 296333462 |
| 97457_Patient-02go_adipose | 8.2 |
| 97476_Patient-07sk_skeletal muscle | 0.0 |
| 97477_Patient-07ut_uterus | 9.7 |
| 97478_Patient-07pl_placenta | 10.0 |
| 99167_Bayer Patient 1 | 0.0 |
| 97482_Patient-08ut_uterus | 7.3 |
| 97483_Patient-08pl_placenta | 4.2 |
| 97486_Patient-09sk_skeletal muscle | 10.7 |
| 97487_Patient-09ut_uterus | 5.5 |
| 97488_Patient-09pl_placenta | 4.5 |
| 97492_Patient-10ut_uterus | 4.0 |
| 97493_Patient-10pl_placenta | 12.8 |
| 97495_Patient-11go_adipose | 3.3 |
| 97496_Patient-11sk_skeletal muscle | 12.0 |
| 97497_Patient-11ut_uterus | 11.0 |
| 97498_Patient-11pl_placenta | 5.8 |
| 97500_Patient-12go_adipose | 8.8 |
| 97501_Patient-12sk_skeletal muscle | 33.4 |
| 97502_Patient-12ut_uterus | 9.9 |
| 97503_Patient-12pl_placenta | 20.9 |
| 94721_Donor 2 U - A_Mesenchymal Stem Cells | 100.0 |
| 94722_Donor 2 U - B_Mesenchymal Stem Cells | 63.3 |
| 94723_Donor 2 U - C_Mesenchymal Stem Cells | 68.3 |
| 94709_Donor 2 AM - A_adipose | 46.0 |
| 94710_Donor 2 AM - B_adipose | 28.7 |
| 94711_Donor 2 AM - C_adipose | 27.4 |
| 94712_Donor 2 AD - A_adipose | 48.3 |
| 94713_Donor 2 AD - B_adipose | 65.5 |
| 94714_Donor 2 AD - C_adipose | 46.0 |
| 94742_Donor 3 U - A_Mesenchymal Stem Cells | 22.4 |
| 94743_Donor 3 U - B_Mesenchymal Stem Cells | 28.1 |
| 94730_Donor 3 AM - A_adipose | 62.9 |
| 94731_Donor 3 AM - B_adipose | 77.9 |
| 94732_Donor 3 AM - C_adipose | 70.7 |
| 94733_Donor 3 AD - A_adipose | 69.3 |
| 94734_Donor 3 AD - B adipose | 57.8 |
| 94735_Donor 3 AD - C_adipose | 17.1 |
| 77138_Liver_HepG2untreated | 31.6 |
| 73556_Heart_Cardiac stromal cells (primary) | 9.1 |
| 81735_Small Intestine | 15.2 |
| 72409_Kidney_Proximal Convoluted Tubule | 14.4 |
| 82685_Small intestine_Duodenum | 5.4 |
| 90650_Adrenal_Adrenocortical adenoma | 7.7 |
| 72410_Kidney_HRCE | 35.1 |
| 72411_Kidney_HRE | 12.4 |
| 73139_Uterus_Uterine smooth muscle cells | 24.7 |

[0794] General_screening_panel_v1.7 Summary: Ag7706 Highest expression of this gene is detected in ovarian cancer IGROV-1 cell line (CT=26.2). Moderate to highe levels of expression of this gene is also seen in cluster of cancer cell lines derived from pancreatic, gastric, colon, lung, renal, breast, ovarian, prostate, melanoma and brain cancers. Thus, expression of this gene could be used as a marker to detect the presence of these cancers. Furthermore, therapeutic modulation of the expression or function of this gene may be effective in the treatment of pancreatic, gastric, colon, lung, renal, breast, ovarian, prostate, melanoma and brain cancers.

[0795] Among tissues with metabolic or endocrine function, this gene is expressed at moderate levels in pancreas, adipose, adrenal gland, thyroid, pituitary gland, skeletal muscle, heart, liver and the gastrointestinal tract. Therefore, therapeutic modulation of the activity of this gene may prove useful in the treatment of endocrine/metabolically related diseases, such as obesity and diabetes.

[0796] In addition, this gene is expressed at high to moderate levels in all regions of the central nervous system examined, including amygdala, hippocampus, substantia nigra, thalamus, cerebellum, cerebral cortex, and spinal cord. Therefore, therapeutic modulation of this gene product may be useful in the treatment of central nervous system disorders such as Alzheimer's disease, Parkinson's disease, epilepsy, multiple sclerosis, schizophrenia and depression.

[0797] Panel 1.3D Summary: Ag2022 Two results using the same probe and primer set show results that are in excellent agreement, with highest expression of this gene in adult skeletal muscle (CTs=27). This gene also shows moderate expression in other tissues with metabolic function including adipose, adult and fetal heart and liver, adult skeletal muscle, pancreas, and the adrenal, thyroid, and pituitary glands. Expression is much lower in fetal skeletal muscle (CTs=30) relative to the adult tissue (CTs=27), which may implicate the expression of this gene in differentiation of skeletal muscle and thus suggests that expression of this gene could be used to differentiate between the adult and fetal phenotypes of this tissue. The pathway mediated by MAP kinase kinase (MAPKK) has been shown to influence myoblast proliferation (ref. 3) and both insulin and exercise stimulate signaling via this pathway in skeletal muscle (ref. 4). Insulin resistance in obese and diabetic subjects may in part be due to tumor necrosis factor alpha, whose effects are mediated through interference with the normal activation of MAPKK by insulin (ref. 5). In addition, exercise training significantly improves insulin-induced MAPKK activity in obese Zucker rats(ref. 6). This indicates that an activator of this kinase may be an effective pharmaceutical agent in the treatment of diabetes. Furthermore, activation of the MAPKK pathway is involved in adipocyte differentiation from preadipocytes in androgen deficiency (ref. 7). Therefore, a MAPKK antagonist may be a suitable pharmacological agent in the treatment of obesity in some cases.

[0798] This gene is expressed at higher levels in cell lines derived from melanoma, and kidney and lung cancers compared to the normal tissues and may play a role in cancers in these tissues. Thus, the expression of this gene could be useful as a marker or as a therapeutic for lung and kidney cancer as well as melanomas. In addition, therapeutic modulation of the activity of the gene product, through the use of peptides, chimeric molecules or small molecule drugs, may be useful in the therapy of these cancers.

[0799] This gene, a homolog of Mitogen Activated Protein Kinase Kinase, is expressed at high to moderate levels across the brain, with highest expression in the central nervous seen in the thalamus (CT=28.4). Mitogen Activated Protein Kinase Kinase is activated by Valproic acid, a drug that is used to treat both seizure disorders and bipolar depression. Valproic acid is believed to work by increasing neuronal production of GABA, the major inhibitory neurotransmitter in the brain. Selective activation of this kinase may therefore have therapeutic benefit in the treatment of seizure disorders, bipolar disorder, or in any other neurological/psychiatric condition believed to be caused by a GABA deficit (schizophrenia).

[0800] See Yuan P X, Huang L D, Jiang Y M, Gutkind J S, Manji H K, Chen G. (2001) The mood stabilizer valproic acid activates mitogen-activated protein kinases and promotes neurite growth. J Biol Chem. 276:31674-83. PMID: 11418608; Bulleit R F, Hsieh T. (2000) MEK inhibitors block BDNF-dependent and -independent expression of GABA(A) receptor subunit mRNAs in cultured mouse cerebellar granule neurons. Brain Res Dev Brain Res. 119:1-10. PMID: 10648867; Jones N C, Fedorov Y V, Rosenthal R S, Olwin BB. (2001) ERK1/2 is required for myoblast proliferation but is dispensable for muscle gene expression and cell fusion. J Cell Physiol. 186:104-15. PMID: 11147804; Wojtaszewski J F, Lynge J, Jakobsen A B, Goodyear L J, Richter E A. (1999) Differential regulation of MAP kinase by contraction and insulin in skeletal muscle: metabolic implications. Am J. Physiol. 277(4 Pt 1):E724-32. PMID: 10516133; Begum N, Ragolia L, Srinivasan M. (1996) Effect of tumor necrosis factor-alpha on insulin-stimulated mitogen-activated protein kinase cascade in cultured rat skeletal muscle cells. Eur J. Biochem. 238:214-20. PMID: 8665940; Osman A A, Hancock J, Hunt D G, Ivy J L, Mandarino L J. (2001) Exercise training increases ERK2 activity in skeletal muscle of obese Zucker rats. J Appl Physiol. 90:454-60. PMID: 11160042; and Lacasa D, Garcia E, Henriot D, Agli B, Giudicelli Y. (1997) Site-related specificities of the control by androgenic status of adipogenesis and mitogen-activated protein kinase cascade/c-fos signaling pathways in rat preadipocytes. Endocrinology 138:3181-6. PMID: 9231766.

[0801] Panel 2.2 Summary: Ag2022 Highest expression of this gene in this panel is seen in a breast cancer sample (CT=29.0). The expression of this gene shows an association with samples derived from breast and kidney cancers when compared to the matched normal tissue. Thus, expression of the AC011005_da2 gene could be useful as a marker for breast and kidney cancers. Furthermore, therapeutic activity of the product of this gene, through the use of peptides, chimeric molecules or small molecule drugs, may be useful in the treatment of breast and kidney cancers.

[0802] Panel 4.1D Summary: Ag7706 Highest expression of this gene is detected in resting lung microvascular cells (CT=33.6). Low expression of this gene is also seen in resting and activated dermal and lung fibroblasts, resting keratinocytes, coronery artery SMC, activated small airway epithelium, resting dendritic cells and eosinophils, resting and activated HUVEC cells, activated B lymphocytes and Ramos B cells, resting IL-2 treated NK cells, activated naive and memory T cells, activated primary and secondary polarized T cells. Therefore, therapeutic modulation of this gene product may ameliorate symptoms/conditions associated with autoimmune and inflammatory disorders including psoriasis, allergy, asthma, inflammatory bowel disease, rheumatoid arthritis and osteoarthritis

[0803] Panel 4D Summary: Ag2022 Expression of this gene is ubiquitous throughout this panel. Highest expression of this gene is found in the basophil cell line, KU-812, upon activation with PMA/ionomycin (CT=26.2), compared to non-activated cells. High expression of this gene is also found on activated B cells, a B cell line, and dermal fibroblasts. This gene is homologous to a Mitogen Activated Protein Kinase Kinase 2 (MAPKK2), a serine threonine kinase which functions downstream of Raf in the signaling pathway that affects proliferation and differentiation. The high expression of this kinase on basophiles suggests a role for this kinase in mast cell/basophile signal transduction. Activated mast/basophile cells have been associated with many atopic diseases, including asthma, atopic contact dermatitis, allergies, and rhinitis. Therefore, therapeutic modulation of the expression or function of this gene product, through the use of small molecule drugs, might be beneficial in the treatment of these diseases. In addition, the high expression of this kinase in activated B cells suggests that the use of small molecule drugs designed to the this gene product could prevent B cell hyperproliferative disorders such as autoimmune diseases and lymphomas.

[0804] Panel 5 Islet Summary: Ag2022 This gene shows wide spread expression with highest expression seen in mesenchymal stem cells (CT=28.7). Expression of this gene is higher in undifferentiated and differentiated adipose tissue. Expression of this gene is detected in skeletal muscle, adipose tissue, uterus, placenta, kidney and small intestine. TNF alpha is one of the key factors involved in obesity-associated insulin resistance and is known to activate MEK1/2. Recently, it has been shown that inhibition of MEK1/2 restores insulin sensitivity induced by TNFalpha (Mol. Endocrinology, 2000, 14, 1557; J. Cell Physiol., 1999, 179,58). Thus, an antagonist of MEK2 should be beneficial for the treatment insulin resistance/diabetes.

[0805] Q. CG55838-04: Dual Specificity Mitogen-Activated Protein Kinase Kinase 2.

[0806] Expression of gene CG55838-04 was assessed using the primer-probe sets Ag2022 and Ag7822, described in Tables QA and QB. Results of the RTQ-PCR runs are shown in Tables QC, QD, QE, QF and QG. Please note that CG55838-04 represents a full-length physical clone.

TABLE OA
Probe Name Ag2022

| | | | Start | SEQ |
|---|---|---|---|---|
| Primers | Sequences | Length | Position | ID No |
| Forward | 5′-ccaggagtttgtcaataaatgc-3′ | 22 | 976 | 211 |
| Probe | TET-5′-ctcatcaagaacccagcggagcg-3′-TAMRA | 23 | 998 | 212 |
| Reverse | 5′-ttyatgaaggtgtggtttgtg-3′ | 21 | 1039 | 213 |

[0807] TABLE OB
Probe Name Ag7822

| | | | Start | SEQ |
|---|---|---|---|---|
| Primers | Sequences | Length | Position | ID No |
| Forward | 5′-ccaacatcctcgtgaactctaga-3′ | 23 | 606 | 214 |
| Probe | TET-5′-aaccgctccggcccgaagtcaca-3′-TAMRA | 23 | 644 | 215 |
| Reverse | 5′-gtccgactgcaccgagtaa-3′ | 19 | 679 | 216 |

[0808] TABLE QC
General_screening_panel_v1.7

| | Rel.Exp. (%) |
|---|---|
| | Ag7822, Run |
| Tissue Name | 319066239 |
| Adipose | 7.9 |
| HUVEC | 44.4 |
| Melanoma* Hs688(A).T | 0.0 |
| Melanoma* Hs688(B).T | 8.2 |
| Melanoma (met) SK-MEL-5 | 2.4 |
| Testis | 2.9 |
| Prostate ca. (bone met) PC-3 | 3.3 |
| Prostate ca. DU145 | 62.9 |
| Prostate pool | 2.8 |
| Uterus pool | 0.7 |
| Ovarian ca. OVCAR-3 | 15.5 |
| Ovarian ca. (ascites) SK-OV-3 | 0.0 |
| Ovarian ca. OVCAR-4 | 11.9 |
| Ovarian ca. OVCAR-5 | 2.6 |
| Ovarian ca. IGROV-1 | 67.8 |
| Ovarian ca. OVCAR-8 | 60.3 |
| Ovary | 13.2 |
| Breast ca. MCF-7 | 14.0 |
| Breast ca. MDA-MB-231 | 79.6 |
| Breast ca. BT-549 | 18.3 |
| Breast ca. T47D | 77.9 |
| Breast pool | 2.0 |
| Trachea | 9.2 |
| Lung | 8.5 |
| Fetal Lung | 10.4 |
| Lung ca. NCI-N417 | 30.8 |
| Lung ca. LX-1 | 21.8 |
| Lung ca. NCI-H146 | 12.2 |
| Lung ca. SHP-77 | 28.9 |
| Lung ca. NCI-H23 | 3.6 |
| Lung ca. NCI-H460 | 3.1 |
| Lung ca. HOP-62 | 100.0 |
| Lung ca. NCI-H522 | 5.6 |
| Lung ca. DMS-114 | 9.7 |
| Liver | 0.6 |
| Fetal Liver | 4.7 |
| Kidney pool | 7.1 |
| Fetal Kidney | 7.9 |
| Renal ca. 786-0 | 1.9 |
| Renal ca. A498 | 9.9 |
| Renal ca. ACHN | 2.3 |
| Renal ca. UO-31 | 1.6 |
| Renal ca. TK-10 | 5.3 |
| Bladder | 4.9 |
| Gastric ca. (liver met.) NCI-N87 | 0.6 |
| Stomach | 0.0 |
| Colon ca. SW-948 | 2.0 |
| Colon ca. SW480 | 1.7 |
| Colon ca. (SW480 met) SW620 | 28.9 |
| Colon ca. HT29 | 33.4 |
| Colon ca. HCT-116 | 69.3 |
| Colon cancer tissue | 0.0 |
| Colon ca. SW1116 | 3.2 |
| Colon ca. Colo-205 | 9.7 |
| Colon ca. SW-48 | 4.6 |
| Colon | 1.2 |
| Small Intestine | 0.6 |
| Fetal Heart | |
| Heart | 0.5 |
| Lymph Node pool 1 | 2.9 |
| Lymph Node pool 2 | 16.0 |
| Fetal Skeletal Muscle | 2.8 |
| Skeletal Muscle pool | 2.8 |
| Skeletal Muscle | 55.9 |
| Spleen | 1.2 |
| Thymus | 4.0 |
| CNS cancer (glio/astro) SF-268 | 4.2 |
| CNS cancer (glio/astro) T98G | 1.0 |
| CNS cancer (neuro; met) SK-N-AS | 0.0 |
| CNS cancer (astro) SF-539 | 11.3 |
| CNS cancer (astro) SNB-75 | 61.1 |
| CNS cancer (glio) SNB-19 | 5.9 |
| CNS cancer (glio) SF-295 | 20.6 |
| Brain (Amygdala) | 12.6 |
| Brain (Cerebellum) | 31.4 |
| Brain (Fetal) | 12.2 |
| Brain (Hippocampus) | 13.0 |
| Cerebral Cortex pool | 18.8 |
| Brain (Substantia nigra) | 14.6 |
| Brain (Thalamus) | 11.0 |
| Brain (Whole) | 18.6 |
| Spinal Cord | 17.6 |
| Adrenal Gland | 1.3 |
| Pituitary Gland | 21.9 |
| Salivary Gland | 0.6 |
| Thyroid | 3.4 |
| Pancreatic ca. PANC-1 | 31.9 |
| Pancreas pool | 4.2 |

[0809] TABLE QD
Panel 1.3D

| | Rel. Exp. (%) | Rel. Exp. (%) |
|---|---|---|
| | Ag2022, Run | Ag2022, Run |
| Tissue Name | 165626371 | 165627116 |
| Liver adenocarcinoma | 23.2 | 15.8 |
| Pancreas | 9.6 | 4.3 |
| Pancreatic ca. CAPAN2 | 4.1 | 4.4 |
| Adrenal gland | 8.0 | 10.3 |
| Thyroid | 12.1 | 9.6 |
| Salivary gland | 10.9 | 5.9 |
| Pituitary gland | 12.0 | 9.6 |
| Brain (fetal) | 13.6 | 7.6 |
| Brain (whole) | 47.3 | 25.0 |
| Brain (amygdala) | 33.7 | 19.9 |
| Brain (cerebellum) | 33.2 | 16.3 |
| Brain (hippocampus) | 42.6 | 21.6 |
| Brain (Substantia nigra) | 30.6 | 13.8 |
| Brain (thalamus) | 50.3 | 24.5 |
| Cerebral Cortex | 36.6 | 31.4 |
| Spinal cord | 16.8 | 8.7 |
| glio/astro U87-MG | 17.6 | 18.4 |
| glio/astro U-118-MG | 54.7 | 38.4 |
| astrocytoma SW1783 | 13.5 | 12.8 |
| neuro*; met SK-N-AS | 15.4 | 12.9 |
| astrocytoma SF-539 | 14.3 | 9.4 |
| astrocytoma SNB-75 | 29.5 | 25.7 |
| glioma SNB-19 | 23.7 | 17.8 |
| glioma U251 | 38.4 | 34.4 |
| glioma SF-295 | 18.4 | 17.2 |
| Heart (fetal) | 17.2 | 16.3 |
| Heart | 25.7 | 10.2 |
| Skeletal muscle (fetal) | 12.2 | 12.9 |
| Skeletal muscle | 100.0 | 100.0 |
| Bone marrow | 15.0 | 14.5 |
| Thymus | 7.6 | 8.1 |
| Spleen | 14.5 | 11.4 |
| Lymph node | 25.7 | 19.2 |
| Colorectal | 6.7 | 4.7 |
| Stomach | 14.5 | 10.0 |
| Small intestine | 30.1 | 32.3 |
| Colon ca. SW480 | 9.2 | 6.7 |
| Colon ca.* SW620(SW480 met) | 3.1 | 4.1 |
| Colon ca. HT29 | 1.4 | 2.5 |
| Colon ca. HCT-116 | 8.5 | 9.1 |
| Colon ca. CaCo-2 | 5.6 | 7.0 |
| Colon ca. tissue(ODO3866) | 11.8 | 11.5 |
| Colon ca. HCC-2998 | 4.6 | 7.2 |
| Gastric ca.* (liver met) | 13.0 | 9.3 |
| NCI-N87 | | |
| Bladder | 3.4 | 4.2 |
| Trachea | 13.7 | 10.4 |
| Kidney | 14.6 | 6.3 |
| Kidney (fetal) | 9.2 | 4.2 |
| Renal ca. 786-0 | 9.5 | 7.3 |
| Renal ca. A498 | 23.2 | 19.3 |
| Renal ca. RXF 393 | 16.8 | 15.9 |
| Renal ca. ACHN | 14.4 | 10.5 |
| Renal ca. UO-31 | 11.2 | 8.1 |
| Renal ca. TK-10 | 5.4 | 4.8 |
| Liver | 11.2 | 3.4 |
| Liver (fetal) | 24.1 | 18.7 |
| Liver ca. | 12.8 | 9.9 |
| (hepatoblast) HepG2 | | |
| Lung | 11.4 | 11.8 |
| Lung (fetal) | 11.8 | 8.9 |
| Lung ca. (small cell) LX-1 | 12.4 | 8.4 |
| Lung ca. (small cell) NCI-H69 | 15.8 | 17.0 |
| Lung ca. (s. cell var.) | 11.3 | 12.6 |
| SHP-77 | | |
| Lung ca. (large | 30.6 | 28.3 |
| cell)NCI-H460 | | |
| Lung ca. (non-sm. cell) A549 | 5.7 | 6.2 |
| Lung ca. (non-s. cell) | 6.3 | 7.0 |
| NCI-H23 | | |
| Lung ca. (non-s. cell) | 13.1 | 12.0 |
| HOP-62 | | |
| Lung ca. (non-s. cl) | 5.7 | 4.5 |
| NCI-H522 | | |
| Lung ca. (squam.) SW 900 | 3.6 | 4.1 |
| Lung ca. (squam.) NCI-H596 | 12.2 | 11.0 |
| Mammary gland | 7.2 | 8.8 |
| Breast ca.* (pl. ef) MCF-7 | 9.6 | 9.1 |
| Breast ca.* (pl. ef) | 47.0 | 56.6 |
| MDA-MB-231 | | |
| Breast ca.* (pl. ef) T47D | 4.7 | 4.6 |
| Breast ca. BT-549 | 19.6 | 20.6 |
| Breast ca. MDA-N | 6.3 | 6.2 |
| Ovary | 7.3 | 6.4 |
| Ovarian ca. OVCAR-3 | 7.4 | 5.6 |
| Ovarian ca. OVCAR-4 | 27.9 | 20.6 |
| Ovarian ca, OVCAR-5 | 7.0 | 7.0 |
| Ovarian ca. OVCAR-8 | 11.7 | 9.8 |
| Ovarian ca. IGROV-1 | 3.5 | 2.3 |
| Ovarian ca.* (ascites) | 23.7 | 17.0 |
| SK-OV-3 | | |
| Uterus | 25.9 | 18.7 |
| Placenta | 10.9 | 6.3 |
| Prostate | 10.5 | 10.4 |
| Prostate ca.* (bone | 20.4 | 18.0 |
| met)PC-3 | | |
| Testis | 27.2 | 19.3 |
| Melanoma Hs688(A).T | 6.6 | 5.1 |
| Melanoma* (met) Hs688(B).T | 10.7 | 8.5 |
| Melanoma UACC-62 | 43.5 | 36.1 |
| Melanoma M14 | 42.0 | 36.9 |
| Melanoma LOX IMVI | 8.0 | 9.0 |
| Melanoma* (met) SK-MEL-5 | 15.9 | 14.2 |
| Adipose | 4.8 | 3.8 |

[0810] TABLE QE
Panel 2.2

| | Rel.Exp. (%) |
|---|---|
| | Ag2022, Run |
| Tissue Name | 174232815 |
| Normal Colon | 24.7 |
| Colon cancer (OD06064) | 14.4 |
| Colon Margin (OD06064) | 18.0 |
| Colon cancer (OD06159) | 12.2 |
| Colon Margin (OD06159) | 18.2 |
| Colon cancer (OD06297-04) | 15.5 |
| Colon Margin (OD06297-05) | 23.7 |
| CC Gr.2 ascend colon (ODO3921) | 25.7 |
| CC Margin (ODO3921) | 21.9 |
| Colon cancer metastasis (OD06104) | 6.0 |
| Lung Margin (OD06104) | 19.6 |
| Colon mets to lung (OD04451-01) | 30.1 |
| Lung Margin (OD04451-02) | 11.4 |
| Normal Prostate | 21.9 |
| Prostate Cancer (OD04410) | 9.1 |
| Prostate Margin (OD04410) | 11.2 |
| Normal Ovary | 58.2 |
| Ovarian cancer (OD06283-03) | 12.9 |
| Ovarian Margin (OD06283-07) | 8.5 |
| Ovarian Cancer 064008 | 15.8 |
| Ovarian cancer (OD06145) | 19.2 |
| Ovarian Margin (OD06145) | 34.4 |
| Ovarian cancer (OD06455-03) | 11.0 |
| Ovarian Margin (OD06455-07) | 2.8 |
| Normal Lung | 11.3 |
| Invasive poor diff. lung adeno (ODO4945-01 | 19.1 |
| Lung Margin (ODO4945-03) | 9.9 |
| Lung Malignant Cancer (OD03126) | 22.4 |
| Lung Margin (OD03126) | 8.6 |
| Lung Cancer (OD05014A) | 24.5 |
| Lung Margin (OD05014B) | 13.8 |
| Lung cancer (OD06081) | 12.4 |
| Lung Margin (OD06081) | 2.6 |
| Lung Cancer (OD04237-01) | 14.5 |
| Lung Margin (OD04237-02) | 29.7 |
| Ocular Melanoma Metastasis | 44.4 |
| Ocular Melanoma Margin (Liver) | 12.2 |
| Melanoma Metastasis | 32.5 |
| Melanoma Margin (Lung) | 13.2 |
| Normal Kidney | 14.9 |
| Kidney Ca, Nuclear grade 2 (OD04338) | 40.9 |
| Kidney Margin (OD04338) | 12.3 |
| Kidney Ca Nuclear grade 1/2 (OD04339) | 49.3 |
| Kidney Margin (OD04339) | 17.9 |
| Kidney Ca, Clear cell type (OD04340) | 21.0 |
| Kidney Margin (OD04340) | 18.0 |
| Kidney Ca, Nuclear grade 3 (OD04348) | 16.6 |
| Kidney Margin (OD04348) | 70.7 |
| Kidney malignant cancer (OD06204B) | 22.1 |
| Kidney normal adjacent tissue (OD06204E) | 18.7 |
| Kidney Cancer (OD04450-01) | 48.3 |
| Kidney Margin (OD04450-03) | 16.6 |
| Kidney Cancer 8120613 | 14.1 |
| Kidney Margin 8120614 | 40.6 |
| Kidney Cancer 9010320 | 20.4 |
| Kidney Margin 9010321 | 12.9 |
| Kidney Cancer 8120607 | 48.0 |
| Kidney Margin 8120608 | 37.9 |
| Normal Uterus | 11.9 |
| Uterine Cancer 064011 | 16.7 |
| Normal Thyroid | 9.7 |
| Thyroid Cancer 064010 | 19.1 |
| Thyroid Cancer A302152 | 28.3 |
| Thyroid Margin A302153 | 11.8 |
| Normal Breast | 12.3 |
| Breast Cancer (OD04566) | 12.9 |
| Breast Cancer 1024 | 23.2 |
| Breast Cancer (OD04590-01) | 46.0 |
| Breast Cancer Mets (OD04590-03) | 35.6 |
| Breast Cancer Metastasis (OD04655-05) | 100.0 |
| Breast Cancer 064006 | 19.3 |
| Breast Cancer 9100266 | 8.3 |
| Breast Margin 9100265 | 9.3 |
| Breast Cancer A209073 | 3.6 |
| Breast Margin A2090734 | 22.1 |
| Breast cancer (OD06083) | 47.3 |
| Breast cancer node metastasis (OD06083) | 49.0 |
| Normal Liver | 29.3 |
| Liver Cancer 1026 | 31.2 |
| Liver Cancer 1025 | 39.2 |
| Liver Cancer 6004-T | 36.1 |
| Liver Tissue 6004-N | 8.1 |
| Liver Cancer 6005-T | 74.2 |
| Liver Tissue 6005-N | 74.2 |
| Liver Cancer 064003 | 45.7 |
| Normal Bladder | 19.3 |
| Bladder Cancer 1023 | 29.9 |
| Bladder Cancer A302173 | 31.0 |
| Normal Stomach | 48.6 |
| Gastric Cancer 9060397 | 16.5 |
| Stomach Margin 9060396 | 33.2 |
| Gastric Cancer 9060395 | 14.6 |
| Stomach Margin 9060394 | 34.4 |
| Gastric Cancer 064005 | 25.3 |

[0811] TABLE QF
Panel 4D

| | Rel.Exp. (%) |
|---|---|
| | Ag2022, Run |
| Tissue Name | 160996807 |
| Secondary Th1 act | 21.3 |
| Secondary Th2 act | 16.3 |
| Secondary Tr1 act | 0.0 |
| Secondary Th1 rest | 5.2 |
| Secondary Th2 rest | 6.7 |
| Secondary Tr1 rest | 6.3 |
| Primary Th1 act | 15.6 |
| Primary Th2 act | 12.9 |
| Primary Tr1 act | 20.2 |
| Primary Th1 rest | 23.2 |
| Primary Th2 rest | 11.4 |
| Primary Tr1 rest | 1.6 |
| CD45RA CD4 lymphocyte act | 12.7 |
| CD45RO CD4 lymphocyte act | 11.4 |
| CD8 lymphocyte act | 12.4 |
| Secondary CD8 lymphocyte rest | 12.0 |
| Secondary CD8 lymphocyte act | 11.4 |
| CD4 lymphocyte none | 3.2 |
| 2ry Th1/Th2/Tr1 anti-CD95 CH11 | 9.0 |
| LAK cells rest | 10.6 |
| LAK cells IL-2 | 12.8 |
| LAK cells IL-2 + IL-12 | 9.3 |
| LAK cells IL-2 + IFN gamma | 11.3 |
| LAK cells IL-2 + IL-18 | 9.3 |
| LAK cells PMA/ionomycin | 5.8 |
| NK Cells IL-2 rest | 9.7 |
| Two Way MLR 3 day | 9.2 |
| Two Way MLR 5 day | 11.5 |
| Two Way MLR 7 day | 7.5 |
| PBMC rest | 3.9 |
| PBMC PWM | 24.7 |
| PBMC PHA-L | 12.6 |
| Ramos (B cell) none | 13.6 |
| Ramos (B cell) ionomycin | 32.3 |
| B lymphocytes PWM | 50.0 |
| B lymphocytes CD40L and IL-4 | 25.5 |
| EOL-1 dbcAMP | 18.0 |
| EOL-1 dbcAMP PMA/ionomycin | 27.5 |
| Dendritic cells none | 10.1 |
| Dendritic cells LPS | 6.9 |
| Dendritic cells anti-CD40 | 9.0 |
| Monocytes rest | 11.1 |
| Monocytes LPS | 7.0 |
| Macrophages rest | 12.5 |
| Macrophages LPS | 5.9 |
| HUVEC none | 22.2 |
| HUVEC starved | 22.4 |
| HUVEC IL-1beta | 3.8 |
| HUVEC IFN gamma | 15.3 |
| HUVEC TNF alpha + IFN gamma | 13.4 |
| HUVEC TNF alpha + IL4 | 13.7 |
| HUVEC IL-11 | 13.8 |
| Lung Microvascular EC none | 14.9 |
| Lung Microvascular EC TNFalpha + IL-1beta | 18.0 |
| Microvascular Dermal EC none | 22.2 |
| Microsvasular Dermal EC TNFalpha + IL-1beta | 18.8 |
| Bronchial epithelium TNFalpha + IL1beta | 5.8 |
| Small airway epithelium none | 6.9 |
| Small airway epithelium TNFalpha + IL-1beta | 25.2 |
| Coronery artery SMC rest | 18.6 |
| Coronery artery SMC TNFalpha + IL-1beta | 14.0 |
| Astrocytes rest | 12.6 |
| Astrocytes TNFalpha + IL-1beta | 15.5 |
| KU-812 (Basophil) rest | 58.6 |
| KU-812 (Basophil) PMA/ionomycin | 100.0 |
| CCD1106 (Keratinocytes) none | 14.3 |
| CCD1106 (Keratinocytes) TNFalpha + IL-1beta | 1.7 |
| Liver cirrhosis | 1.6 |
| Lupus kidney | 1.4 |
| NCI-H292 none | 19.9 |
| NCI-H292 IL-4 | 20.4 |
| NCI-H292 IL-9 | 22.4 |
| NCI-H292 IL-13 | 12.6 |
| NCI-H292 IFN gamma | 12.9 |
| HPAEC none | 16.4 |
| HPAEC TNF alpha + IL-1 beta | 17.6 |
| Lung fibroblast none | 23.0 |
| Lung fibroblast TNF alpha + IL-1 beta | 14.3 |
| Lung fibroblast IL-4 | 30.8 |
| Lung fibroblast IL-9 | 27.2 |
| Lung fibroblast IL-13 | 19.6 |
| Lung fibroblast IFN gamma | 27.5 |
| Dermal fibroblast CCD1070 rest | 24.7 |
| Dermal fibroblast CCD1070 TNF alpha | 47.3 |
| Dermal fibroblast CCD1070 IL-1 beta | 21.5 |
| Dermal fibroblast IFN gamma | 12.5 |
| Dermal fibroblast IL-4 | 22.5 |
| IBD Colitis 2 | 0.8 |
| IBD Crohn's | 1.3 |
| Colon | 13.8 |
| Lung | 8.6 |
| Thymus | 9.9 |
| Kidney | 18.7 |

[0812] TABLE QG
Panel 5 Islet

| | Rel. Exp. (%) | Rel. Exp. (%) |
|---|---|---|
| | Ag2022, Run | Ag7822, Run |
| Tissue Name | 296333462 | 319961194 |
| 97457_Patient-02go_adipose | 8.2 | 1.7 |
| 97476_Patient-07sk_skeletal | 0.0 | 0.0 |
| muscle | | |
| 97477_Patient-07ut_uterus | 9.7 | 0.0 |
| 97478_Patient-07pl_placenta | 10.0 | 3.0 |
| 99167_Bayer Patient 1 | 0.0 | 24.0 |
| 97482_Patient-08ut_uterus | 7.3 | 0.0 |
| 97483_Patient-08pl_placenta | 4.2 | 7.0 |
| 97486_Patient-09sk_skeletal | 10.7 | 18.3 |
| muscle | | |
| 97487_Patient-09ut_uterus | 5.5 | 0.0 |
| 97488_Patient-09pl_placenta | 4.5 | 3.9 |
| 97492_Patient-10ut_uterus | 4.0 | 4.0 |
| 97493_Patient-10pl_placenta | 12.8 | 0.0 |
| 97495_Patient-11go_adipose | 3.3 | 0.0 |
| 97496_Patient-11sk_skeletal | 12.0 | 1.7 |
| muscle | | |
| 97497_Patient-11ut_uterus | 11.0 | 6.6 |
| 97498_Patient-11pl_placenta | 5.8 | 0.0 |
| 97500_Patient-12go_adipose | 8.8 | 0.0 |
| 97501_Patient-12sk_skeletal | 33.4 | 9.9 |
| muscle | | |
| 97502_Patient-12ut_uterus | 9.9 | 0.0 |
| 97503_Patient-12pl_placenta | 20.9 | 1.5 |
| 94721_Donor 2 U - | 100.0 | 31.0 |
| A_Mesenchymal Stem Cells | | |
| 94722_Donor 2 U - | 63.3 | 50.0 |
| B_Mesenchymal Stem Cells | | |
| 94723_Donor 2 U - | 68.3 | 27.0 |
| C_Mesenchymal Stem Cells | | |
| 94709_Donor 2 AM - A_adipose | 46.0 | 81.2 |
| 94710_Donor 2 AM - B_adipose | 28.7 | 4.7 |
| 94711_Donor 2 AM - C_adipose | 27.4 | 8.4 |
| 94712_Donor 2 AD - A_adipose | 48.3 | |
| 94713_Donor 2 AD - B_adipose | 65.5 | 16.8 |
| 94714_Donor2 AD - C_adipose | 46.0 | 17.9 |
| 94742_Donor 3 U - | 22.4 | 14.7 |
| A_Mesenchymal Stem Cells | | |
| 94743_Donor 3 U - | 28.1 | 2.4 |
| B_Mesenchymal Stem Cells | | |
| 94730_Donor 3 AM - A_adipose | 62.9 | 0.0 |
| 94731_Donor 3 AM - B_adipose | 77.9 | 2.4 |
| 94732_Donor 3 AM - C_adipose | 70.7 | 3.7 |
| 94733_Donor 3 AD - A_adipose | 69.3 | 100.0 |
| 94734_Donor 3 AD - B_adipose | 57.8 | 0.0 |
| 94735_Donor 3 AD - C_adipose | 17.1 | 0.0 |
| 77138 Liver HepG2untreated | 31.6 | 10.4 |
| 73556_Heart_Cardiac | 9.1 | 0.0 |
| stromal cells (primary) | | |
| 81735_Small Intestine | 15.2 | 0.0 |
| 72409_Kidney_Proximal | 14.4 | 0.0 |
| Convoluted Tubule | | |
| 82685_Small intestine_Duodenum | 5.4 | 17.9 |
| 90650_Adrenal_Adrenocortical | 7.7 | 0.0 |
| adenoma | | |
| 72410_Kidney_HRCE | 35.1 | 11.7 |
| 72411_Kidney_HRE | 12.4 | 0.0 |
| 73139_Uterus_Uterine | 24.7 | 15.5 |
| smooth muscle cells | | |

[0813] General_screening_panel_v1.7 Summary: Ag7822 Highest expression of this gene is detected in lung cancer HOP-62 cell line (CT=29.5). Moderate expression of this gene is also seen in cluster of cancer cell lines derived from pancreatic, gastric, colon, lung, renal, breast, ovarian, prostate, melanoma and brain cancers. Thus, expression of this gene could be used as a marker to detect the presence of these cancers. Furthermore, therapeutic modulation of the expression or function of this gene may be effective in the treatment of pancreatic, gastric, colon, lung, renal, breast, ovarian, prostate, melanoma and brain cancers.

[0814] Among tissues with metabolic or endocrine function, this gene is expressed at moderate to low levels in pancreas, adipose, thyroid, pituitary gland, skeletal muscle, and fetal liver. Therefore, therapeutic modulation of the activity of this gene may prove useful in the treatment of endocrine/metabolically related diseases, such as obesity and diabetes.

[0815] In addition, this gene is expressed at moderate levels in all regions of the central nervous system examined, including amygdala, hippocampus, substantia nigra, thalamus, cerebellum, cerebral cortex, and spinal cord. Therefore, therapeutic modulation of this gene product may be useful in the treatment of central nervous system disorders such as Alzheimer's disease, Parkinson's disease, epilepsy, multiple sclerosis, schizophrenia and depression.

[0816] Panel 1.3D Summary: Ag2022 Two results using the same probe and primer set show results that are in excellent agreement, with highest expression of this gene in adult skeletal muscle (CTs=27). This gene also shows moderate expression in other tissues with metabolic function including adipose, adult and fetal heart and liver, adult skeletal muscle, pancreas, and the adrenal, thyroid, and pituitary glands. Expression is much lower in fetal skeletal muscle (CTs=30) relative to the adult tissue (CTs=27), which may implicate the expression of this gene in differentiation of skeletal muscle and thus suggests that expression of this gene could be used to differentiate between the adult and fetal phenotypes of this tissue. The pathway mediated by MAP kinase kinase (MAPKK) has been shown to influence myoblast proliferation (ref. 3) and both insulin and exercise stimulate signaling via this pathway in skeletal muscle (ref. 4). Insulin resistance in obese and diabetic subjects may in part be due to tumor necrosis factor alpha, whose effects are mediated through interference with the normal activation of MAPKK by insulin (ref. 5). In addition, exercise training significantly improves insulin-induced MAPKK activity in obese Zucker rats(ref. 6). This indicates that an activator of this kinase may be an effective pharmaceutical agent in the treatment of diabetes. Furthermore, activation of the MAPKK pathway is involved in adipocyte differentiation from preadipocytes in androgen deficiency (ref. 7). Therefore, a MAPKK antagonist may be a suitable pharmacological agent in the treatment of obesity in some cases.

[0817] This gene is expressed at higher levels in cell lines derived from melanoma, and kidney and lung cancers compared to the normal tissues and may play a role in cancers in these tissues. Thus, the expression of this gene could be useful as a marker or as a therapeutic for lung and kidney cancer as well as melanomas. In addition, therapeutic modulation of the activity of the gene product, through the use of peptides, chimeric molecules or small molecule drugs, may be useful in the therapy of these cancers.

[0818] This gene, a homolog of Mitogen Activated Protein Kinase Kinase, is expressed at high to moderate levels across the brain, with highest expression in the central nervous seen in the thalamus (CT=28.4). Mitogen Activated Protein Kinase Kinase is activated by Valproic acid, a drug that is used to treat both seizure disorders and bipolar depression. Valproic acid is believed to work by increasing neuronal production of GABA, the major inhibitory neurotransmitter in the brain. Selective activation of this kinase may therefore have therapeutic benefit in the treatment of seizure disorders, bipolar disorder, or in any other neurological/psychiatric condition believed to be caused by a GABA deficit (schizophrenia).

[0819] See Yuan P X, Huang L D, Jiang Y M, Gutkind J S, Manji H K, Chen G. (2001) The mood stabilizer valproic acid activates mitogen-activated protein kinases and promotes neurite growth. J Biol Chem. 276:31674-83. PMID: 11418608; Bulleit R F, Hsieh T. (2000) MEK inhibitors block BDNF-dependent and independent expression of GABA(A) receptor subunit mRNAs in cultured mouse cerebellar granule neurons. Brain Res Dev Brain Res. 119:1-10. PMID: 10648867; Jones N C, Fedorov Y V, Rosenthal R S, Olwin B B. (2001) ERK1/2 is required for myoblast proliferation but is dispensable for muscle gene expression and cell fusion. J Cell Physiol. 186:104-15. PMID: 11147804; Wojtaszewski J F, Lynge J, Jakobsen A B, Goodyear L J, Richter E A. (1999) Differential regulation of MAP kinase by contraction and insulin in skeletal muscle: metabolic implications. Am J Physiol. 277(4 Pt 1):E724-32. PMID: 10516133; Begum N, Ragolia L, Srinivasan M. (1996) Effect of tumor necrosis factor-alpha on insulin-stimulated mitogen-activated protein kinase cascade in cultured rat skeletal muscle cells. Eur J. Biochem. 238:214-20. PMID: 8665940; Osman A A, Hancock J, Hunt D G, Ivy J L, Mandarino L J. (2001) Exercise training increases ERK2 activity in skeletal muscle of obese Zucker rats. J Appl Physiol. 90:454-60. PMID: 11160042; and Lacasa D, Garcia E, Henriot D, Agli B, Giudicelli Y. (1997) Site-related specificities of the control by androgenic status of adipogenesis and mitogen-activated protein kinase cascade/c-fos signaling pathways in rat preadipocytes. Endocrinology 138:3181-6. PMID: 9231766.

[0820] Panel 2.2 Summary: Ag2022 Highest expression of this gene in this panel is seen in a breast cancer sample (CT=29.0). The expression of this gene shows an association with samples derived from breast and kidney cancers when compared to the matched normal tissue. Thus, expression of the AC011005_da2 gene could be useful as a marker for breast and kidney cancers. Furthermore, therapeutic activity of the product of this gene, through the use of peptides, chimeric molecules or small molecule drugs, may be useful in the treatment of breast and kidney cancers.

[0821] Panel 4D Summary: Ag2022 Expression of this gene is ubiquitous throughout this panel. Highest expression of this gene is found in the basophil cell line, KU-812, upon activation with PMA/ionomycin (CT=26.2), compared to non-activated cells. High expression of this gene is also found on activated B cells, a B cell line, and dermal fibroblasts. This gene is homologous to a Mitogen Activated Protein Kinase Kinase 2 (MAPKK2), a serine threonine kinase which functions downstream of Raf in the signaling pathway that affects proliferation and differentiation. The high expression of this kinase on basophiles suggests a role for this kinase in mast cell/basophile signal transduction. Activated mast/basophile cells have been associated with many atopic diseases, including asthma, atopic contact dermatitis, allergies, and rhinitis. Therefore, therapeutic modulation of the expression or function of this gene product, through the use of small molecule drugs, might be beneficial in the treatment of these diseases. In addition, the high expression of this kinase in activated B cells suggests that the use of small molecule drugs designed to the this gene product could prevent B cell hyperproliferative disorders such as autoimmune diseases and lymphomas.

[0822] Panel 5 Islet Summary: Ag2022 This gene shows wide spread expression with highest expression seen in mesenchymal stem cells (CT=28.7). Expression of this gene is higher in undifferentiated and differentiated adipose tissue. Expression of this gene is detected in skeletal muscle, adipose tissue, uterus, placenta, kidney and small intestine. TNF alpha is one of the key factors involved in obesity-associated insulin resistance and is known to activate MEK1/2. Recently, it has been shown that inhibition of MEK1/2 restores insulin sensitivity induced by TNFalpha (Mol. Endocrinology, 2000, 14, 1557; J. Cell Physiol., 1999, 179,58). Thus, an antagonist of MEK2 should be beneficial for the treatment insulin resistance/diabetes.

[0823] Ag7822 Highest expression of this gene is detected in a differentiated adipose tissue (CT=33.9). Low expression of this gene is also seen in midway differentiated adipose tissue.

[0824] R. CG56618-04: Heat Shock Protein HSP90.

[0825] Expression of gene CG56618-04 was assessed using the primer-probe set Ag4548, described in Table RA. Results of the RTQ-PCR runs are shown in Tables RB, RC and RD.

TABLE RA
Probe Name Ag4548

| | | | Start | SEQ |
|---|---|---|---|---|
| Primers | Sequences | Length | Position | ID No |
| Forward | 5′-ggtgtggttgactctgaggat-3′ | 21 | 1228 | 217 |
| Probe | TET-5′-tgaacatctcccgagaaatgctccag-3′-TAMRA | 26 | 1256 | 218 |
| Reverse | 5′-ttgcgaatgactttcaagattt-3′ | 22 | 1289 | 219 |

[0826] TABLE RB
CNS_neurodegeneration_v1.0

| | Rel.Exp. (%) |
|---|---|
| | Ag4548, Run |
| Tissue Name | 224721638 |
| AD 1 Hippo | 19.8 |
| AD 2 Hippo | 31.2 |
| AD 3 Hippo | 11.9 |
| AD 4 Hippo | 5.2 |
| AD 5 Hippo | 75.8 |
| AD 6 Hippo | 72.2 |
| Control 2 Hippo | 32.3 |
| Control 4 Hippo | 9.5 |
| Control (Path) 3 Hippo | 9.3 |
| AD 1 Temporal Ctx | 13.0 |
| AD 2 Temporal Ctx | 34.2 |
| AD 3 Temporal Ctx | 7.1 |
| AD 4 Temporal Ctx | 18.8 |
| AD 5 Inf Temporal Ctx | 88.3 |
| AD 5 Sup Temporal Ctx | 51.4 |
| AD 6 Inf Temporal Ctx | 68.3 |
| AD 6 Sup Temporal Ctx | 56.3 |
| Control 1 Temporal Ctx | 5.1 |
| Control 2 Temporal Ctx | 61.6 |
| Control 3 Temporal Ctx | 13.8 |
| Control 3 Temporal Ctx | 6.9 |
| Control (Path) 1 Temporal Ctx | 68.8 |
| Control (Path) 2 Temporal Ctx | 41.2 |
| Control (Path) 3 Temporal Ctx | 5.1 |
| Control (Path) 4 Temporal Ctx | 29.7 |
| AD 1 Occipital Ctx | 17.1 |
| AD 2 Occipital Ctx (Missing) | 0.0 |
| AD 3 Occipital Ctx | 11.7 |
| AD 4 Occipital Ctx | 12.2 |
| AD 5 Occipital Ctx | 59.9 |
| AD 6 Occipital Ctx | 36.1 |
| Control 1 Occipital Ctx | 5.2 |
| Control 2 Occipital Ctx | 81.8 |
| Control 3 Occipital Ctx | 15.1 |
| Control 4 Occipital Ctx | 5.2 |
| Control (Path) 1 Occipital Ctx | 100.0 |
| Control (Path) 2 Occipital Ctx | 9.2 |
| Control (Path) 3 Occipital Ctx | 3.6 |
| Control (Path) 4 Occipital Ctx | 12.3 |
| Control 1 Parietal Ctx | 6.8 |
| Control 2 Parietal Ctx | 42.6 |
| Control 3 Parietal Ctx | 22.8 |
| Control (Path) 1 Parietal Ctx | 92.7 |
| Control (Path) 2 Parietal Ctx | 16.8 |
| Control (Path) 3 Parietal Ctx | 4.6 |
| Control (Path) 4 Parietal Ctx | 39.2 |

[0827] TABLE RC
General_screening_panel_v1.4

| | Rel. Exp. (%) |
|---|---|
| | Ag4548, Run |
| Tissue Name | 222809448 |
| Adipose | 4.4 |
| Melanoma* Hs688(A).T | 8.4 |
| Melanoma* Hs688(B).T | 8.0 |
| Melanoma* M14 | 27.7 |
| Melanoma* LOXIMVI | 38.7 |
| Melanoma* SK-MEL-5 | 49.7 |
| Squamous cell carcinoma SCC-4 | 15.6 |
| Testis Pool | 2.9 |
| Prostate ca.* (bone met) PC-3 | 16.6 |
| Prostate Pool | 2.7 |
| Placenta | 1.5 |
| Uterus Pool | 1.6 |
| Ovarian ca. OVCAR-3 | 16.0 |
| Ovarian ca. SK-OV-3 | 28.5 |
| Ovarian ca. OVCAR-4 | 14.6 |
| Ovarian ca. OVCAR-5 | 16.5 |
| Ovarian ca. IGROV-1 | 12.2 |
| Ovarian ca. OVCAR-8 | 6.7 |
| Ovary | 5.5 |
| Breast ca. MCF-7 | 13.8 |
| Breast ca. MDA-MB-231 | 39.2 |
| Breast ca. BT 549 | 37.6 |
| Breast ca. T47D | 30.1 |
| Breast ca. MDA-N | 20.3 |
| Breast Pool | 5.8 |
| Trachea | 4.5 |
| Lung | 0.6 |
| Fetal Lung | 9.4 |
| Lung ca. NCI-N417 | 6.6 |
| Lung ca. LX-1 | 19.6 |
| Lung ca. NCI-H146 | 15.8 |
| Lung ca. SHP-77 | 31.4 |
| Lung ca. A549 | 20.3 |
| Lung ca. NCI-H526 | 6.6 |
| Lung ca. NCI-H23 | 31.2 |
| Lung ca. NCI-H460 | 13.2 |
| Lung ca. HOP-62 | 17.4 |
| Lung ca. NCI-H522 | 16.8 |
| Liver | 0.9 |
| Fetal Liver | 7.2 |
| Liver ca. HepG2 | 21.9 |
| Kidney Pool | 8.2 |
| Fetal Kidney | 5.0 |
| Renal ca. 786-0 | 13.7 |
| Renal ca. A498 | 6.8 |
| Renal ca. ACHN | 9.9 |
| Renal ca. UO-31 | 19.2 |
| Renal ca. TK-10 | 27.0 |
| Bladder | 7.0 |
| Gastric ca. (liver met.) NCI-N87 | 18.8 |
| Gastric ca. KATO III | 51.1 |
| Colon ca. SW-948 | 11.9 |
| Colon ca. SW480 | 37.9 |
| Colon ca.* (SW480 met) SW620 | 28.9 |
| Colon ca. HT29 | 18.3 |
| Colon ca. HCT-116 | 100.0 |
| Colon ca. CaCo-2 | 20.3 |
| Colon cancer tissue | 10.5 |
| Colon ca. SW1116 | 6.9 |
| Colon ca. Colo-205 | 2.8 |
| Colon ca. SW-48 | 9.1 |
| Colon Pool | 6.4 |
| Small Intestine Pool | 5.9 |
| Stomach Pool | 4.3 |
| Bone Marrow Pool | 2.0 |
| Fetal Heart | 3.0 |
| Heart Pool | 3.6 |
| Lymph Node Pool | 5.5 |
| Fetal Skeletal Muscle | 2.4 |
| Skeletal Muscle Pool | 10.5 |
| Spleen Pool | 4.3 |
| Thymus Pool | 4.2 |
| CNS cancer (glio/astro) U87-MG | 20.6 |
| CNS cancer (glio/astro) U-118-MG | 27.5 |
| CNS cancer (neuro; met) SK-N-AS | 24.5 |
| CNS cancer (astro) SF-539 | 14.9 |
| CNS cancer (astro) SNB-75 | 28.5 |
| CNS cancer (glio) SNB-19 | 13.4 |
| CNS cancer (glio) SF-295 | 27.2 |
| Brain (Amygdala) Pool | 6.1 |
| Brain (cerebellum) | 6.4 |
| Brain (fetal) | 9.2 |
| Brain (Hippocampus) Pool | 6.0 |
| Cerebral Cortex Pool | 9.4 |
| Brain (Substantia nigra) Pool | 9.2 |
| Brain (Thalamus) Pool | 11.7 |
| Brain (whole) | 10.4 |
| Spinal Cord Pool | 4.8 |
| Adrenal Gland | 11.8 |
| Pituitary gland Pool | 2.4 |
| Salivary Gland | 1.7 |
| Thyroid (female) | 3.9 |
| Pancreatic ca. CAPAN2 | 8.4 |
| Pancreas Pool | 6.9 |

[0828] TABLE RD
Panel 4.1D

| | Rel. Exp. (%) |
|---|---|
| | Ag4548, Run |
| Tissue Name | 198485557 |
| Secondary Th1 act | 82.4 |
| Secondary Th2 act | 90.8 |
| Secondary Tr1 act | 82.9 |
| Secondary Th1 rest | 7.1 |
| Secondary Th2 rest | 12.8 |
| Secondary Tr1 rest | 11.3 |
| Primary Th1 act | 76.8 |
| Primary Th2 act | 95.3 |
| Primary Tr1 act | 100.0 |
| Primary Th1 rest | 11.6 |
| Primary Th2 rest | 6.0 |
| Primary Tr1 rest | 14.4 |
| CD45RA CD4 lymphocyte act | 75.8 |
| CD45RO CD4 lymphocyte act | 90.1 |
| CD8 lymphocyte act | 85.3 |
| Secondary CD8 lymphocyte rest | 82.4 |
| Secondary CD8 lymphocyte act | 47.6 |
| CD4 lymphocyte none | 13.1 |
| 2ry Th1/Th2/Tr1_anti-CD95 CH11 | 12.6 |
| LAK cells rest | 38.7 |
| LAK cells IL-2 | 52.9 |
| LAK cells IL-2 + IL-12 | 55.9 |
| LAK cells IL-2 + IFN gamma | 42.0 |
| LAK cells IL-2 + IL-18 | 46.0 |
| LAK cells PMA/ionomycin | 94.6 |
| NK Cells IL-2 rest | 49.3 |
| Two Way MLR 3 day | 46.3 |
| Two Way MLR 5 day | 62.4 |
| Two Way MLR 7 day | 0.0 |
| PBMC rest | 13.2 |
| PBMC PWM | 90.8 |
| PBMC PHA-L | 73.2 |
| Ramos (B cell) none | 85.3 |
| Ramos (B cell) ionomycin | 78.5 |
| B lymphocytes PWM | 68.8 |
| B lymphocytes CD40L and IL-4 | 49.7 |
| EOL-1 dbcAMP | 55.9 |
| EOL-1 dbcAMP PMA/ionomycin | 57.0 |
| Dendritic cells none | 37.9 |
| Dendritic cells LPS | 24.0 |
| Dendritic cells anti-CD40 | 34.2 |
| Monocytes rest | 13.2 |
| Monocytes LPS | 31.9 |
| Macrophages rest | 43.2 |
| Macrophages LPS | 16.5 |
| HUVEC none | 60.3 |
| HUVEC starved | 74.2 |
| HUVEC IL-1beta | 70.2 |
| HUVEC IFN gamma | 51.1 |
| HUVEC TNF alpha + IFN gamma | 45.1 |
| HUVEC TNF alpha + IL4 | 58.6 |
| HUVEC IL-11 | 39.8 |
| Lung Microvascular EC none | 57.0 |
| Lung Microvascular EC TNFalpha + IL-1beta | 43.8 |
| Microvascular Dermal EC none | 44.1 |
| Microsvasular Dermal EC TNFalpha + IL-1beta | 39.5 |
| Bronchial epithelium TNFalpha + IL1beta | 44.4 |
| Small airway epithelium none | 37.1 |
| Small airway epithelium TNFalpha + IL-1beta | 46.7 |
| Coronery artery SMC rest | 42.6 |
| Coronery artery SMC TNFalpha + IL-1beta | 43.2 |
| Astrocytes rest | 33.4 |
| Astrocytes TNFalpha + IL-1beta | 27.7 |
| KU-812 (Basophil) rest | 79.6 |
| KU-812 (Basophil) PMA/ionomycin | 100.0 |
| CCD1106 (Keratinocytes) none | 53.6 |
| CCD1106 (Keratinocytes) TNFalpha + IL-1beta | 44.4 |
| Liver cirrhosis | 18.9 |
| NCI-H292 none | 42.9 |
| NCI-H292 IL-4 | 68.8 |
| NCI-H292 IL-9 | 64.6 |
| NCI-H292 IL-13 | 61.6 |
| NCI-H292 IFN gamma | 54.3 |
| HPAEC none | 51.8 |
| HPAEC TNF alpha + IL-1 beta | 64.6 |
| Lung fibroblast none | 44.1 |
| Lung fibroblast TNF alpha + IL-1 beta | 35.1 |
| Lung fibroblast IL-4 | 53.6 |
| Lung fibroblast IL-9 | 62.9 |
| Lung fibroblast IL-13 | 56.3 |
| Lung fibroblast IFN gamma | 61.1 |
| Dermal fibroblast CCD1070 rest | 64.6 |
| Dermal fibroblast CCD1070 TNF alpha | 62.0 |
| Dermal fibroblast CCD1070 IL-1 beta | 46.7 |
| Dermal fibroblast IFN gamma | 40.6 |
| Dermal fibroblast IL-4 | 52.5 |
| Dermal Fibroblasts rest | 35.6 |
| Neutrophils TNFa + LPS | 14.3 |
| Neutrophils rest | 9.4 |
| Colon | 12.1 |
| Lung | 24.0 |
| Thymus | 25.5 |
| Kidney | 33.7 |

[0829] CNS_neurodegeneration_v1.0 Summary: Ag4548 This panel confirms the expression of this gene at low levels in the brains of an independent group of individuals. However, no differential expression of this gene was detected between Alzheimer's diseased postmortem brains and those of non-demented controls in this experiment. Please see Panel 1.4 for a discussion of the potential role of this gene in treatment of central nervous system disorders.

[0830] General_screening_panel_v1.4 Summary: Ag4548 Highest expression of this gene is detected in a colon cancer HCT-116 cell line (CT=23.2). High levels of expression of this gene is also seen in cluster of cancer cell lines derived from pancreatic, gastric, colon, lung, liver, renal, breast, ovarian, prostate, squamous cell carcinoma, melanoma and brain cancers. Thus, expression of this gene could be used as a marker to detect the presence of these cancers. Furthermore, therapeutic modulation of the expression or function of this gene may be effective in the treatment of pancreatic, gastric, colon, lung, liver, renal, breast, ovarian, prostate, squamous cell carcinoma, melanoma and brain cancers.

[0831] Among tissues with metabolic or endocrine function, this gene is expressed at moderate to high levels in pancreas, adipose, adrenal gland, thyroid, pituitary gland, skeletal muscle, heart, liver and the gastrointestinal tract. Therefore, therapeutic modulation of the activity of this gene may prove useful in the treatment of endocrine/metabolically related diseases, such as obesity and diabetes.

[0832] In addition, this gene is expressed at high levels in all regions of the central nervous system examined, including amygdala, hippocampus, substantia nigra, thalamus, cerebellum, cerebral cortex, and spinal cord. Therefore, therapeutic modulation of this gene product may be useful in the treatment of central nervous system disorders such as Alzheimer's disease, Parkinson's disease, epilepsy, multiple sclerosis, schizophrenia and depression.

[0833] Interestingly, this gene is expressed at much higher levels in fetal (CTs=26-27) when compared to adult lung and liver (CTs=30). This observation suggests that expression of this gene can be used to distinguish fetal from adult lung and liver. In addition, the relative overexpression of this gene in fetal tissue suggests that the protein product may enhance lung and liver growth or development in the fetus and thus may also act in a regenerative capacity in the adult. Therefore, therapeutic modulation of the protein encoded by this gene could be useful in treatment of lung and liver related diseases.

[0834] Panel 4.1D Summary: Ag4548 Highest expression of this gene is detected in activated primary Tr1 cells (CT=27.3). This gene is expressed at high to moderate levels in a wide range of cell types of significance in the immune response in health and disease. These cells include members of the T-cell, B-cell, endothelial cell, macrophage/monocyte, and peripheral blood mononuclear cell family, as well as epithelial and fibroblast cell types from lung and skin, and normal tissues represented by colon, lung, thymus and kidney. This ubiquitous pattern of expression suggests that this gene product may be involved in homeostatic processes for these and other cell types and tissues. This pattern is in agreement with the expression profile in General_screening_panel_v1.4 and also suggests a role for the gene product in cell survival and proliferation. Therefore, modulation of the gene product with a functional therapeutic may lead to the alteration of functions associated with these cell types and lead to improvement of the symptoms of patients suffering from autoimmune and inflammatory diseases such as asthma, allergies, inflammatory bowel disease, lupus erythematosus, psoriasis, rheumatoid arthritis, and osteoarthritis.

[0835] S. CG57509-01: Calpain 3.

[0836] Expression of gene CG57509-01 was assessed using the primer-probe set Ag2073, described in Table SA. Results of the RTQ-PCR runs are shown in Tables SB and SC.

TABLE SA
Probe Name Ag2073

| | | | Start | SEQ |
|---|---|---|---|---|
| Primers | Sequences | Length | Position | ID No |
| Forward | 5′-acccaagtggcatctattcag-3′ | 21 | 2234 | 220 |
| Probe | TET-5′-tcagccgcaattttcctattatcgga-3′-TAMRA | 26 | 2202 | 221 |
| Reverse | 5′-gtgaagttgctcgaatgtcttc-3′ | 22 | 2172 | 222 |

[0837] TABLE SB
Panel 1.3D

| | Rel. Exp. (%) |
|---|---|
| | Ag2073, Run |
| Tissue Name | 165627447 |
| Liver adenocarcinoma | 0.0 |
| Pancreas | 0.1 |
| Pancreatic ca. CAPAN 2 | 0.0 |
| Adrenal gland | 0.1 |
| Thyroid | 0.5 |
| Salivary gland | 0.3 |
| Pituitary gland | 0.3 |
| Brain (fetal) | 0.0 |
| Brain (whole) | 0.7 |
| Brain (amygdala) | 0.4 |
| Brain (cerebellum) | 0.5 |
| Brain (hippocampus) | 0.8 |
| Brain (substantia nigra) | 0.3 |
| Brain (thalamus) | 0.5 |
| Cerebral Cortex | 0.2 |
| Spinal cord | 0.6 |
| glio/astro U87-MG | 0.0 |
| glio/astro U-118-MG | 0.2 |
| astrocytoma SW1783 | 0.0 |
| neuro*; met SK-N-AS | 0.0 |
| astrocytoma SF-539 | 0.0 |
| astrocytoma SNB-75 | 0.0 |
| glioma SNB-19 | 0.1 |
| glioma U251 | 0.4 |
| glioma SF-295 | 0.0 |
| Heart (fetal) | 0.1 |
| Heart | 0.3 |
| Skeletal muscle (fetal) | 7.7 |
| Skeletal muscle | 100.0 |
| Bone marrow | 2.0 |
| Thymus | 0.2 |
| Spleen | 0.4 |
| Lymph node | 1.0 |
| Colorectal | 0.2 |
| Stomach | 0.4 |
| Small intestine | 0.9 |
| Colon ca. SW480 | 0.0 |
| Colon ca.* SW620(SW480 met) | 0.0 |
| Colon ca. HT29 | 0.0 |
| Colon ca. HCT-116 | 0.0 |
| Colon ca. CaCo-2 | 0.0 |
| Colon ca. tissue(ODO3866) | 0.0 |
| Colon ca. HCC-2998 | 0.0 |
| Gastric ca.* (liver met) NCI-N87 | 0.8 |
| Bladder | 0.1 |
| Trachea | 0.3 |
| Kidney | 0.5 |
| Kidney (fetal) | 0.1 |
| Renal ca. 786-0 | 0.1 |
| Renal ca. A498 | 0.1 |
| Renal ca. RXF 393 | 0.0 |
| Renal ca. ACHN | 0.0 |
| Renal ca. UO-31 | 0.0 |
| Renal ca. TK-10 | 0.1 |
| Liver | 0.3 |
| Liver (fetal) | 0.3 |
| Liver ca. (hepatoblast) HepG2 | 0.0 |
| Lung | 0.4 |
| Lung (fetal) | 0.4 |
| Lung ca. (small cell) LX-1 | 0.2 |
| Lung ca. (small cell) NCI-H69 | 0.0 |
| Lung ca. (s. cell var.) SHP-77 | 0.0 |
| Lung ca. (large cell)NCI-H460 | 0.0 |
| Lung ca. (non-sm. cell) A549 | 0.0 |
| Lung ca. (non-s. cell) NCI-H23 | 0.1 |
| Lung ca. (non-s. cell) HOP-62 | 0.0 |
| Lung ca. (non-s. cl) NCI-H522 | 0.0 |
| Lung ca. (squam.) SW 900 | 0.0 |
| Lung ca. (squam.) NCI-H596 | 0.0 |
| Mammary gland | 0.3 |
| Breast ca.* (pl. ef) MCF-7 | 0.0 |
| Breast ca.* (pl. ef) MDA-MB-231 | 0.1 |
| Breast ca.* (pl. ef) T47D | 0.0 |
| Breast ca. BT-549 | 0.1 |
| Breast ca. MDA-N | 0.0 |
| Ovary | 0.0 |
| Ovarian ca. OVCAR-3 | 0.1 |
| Ovarian ca. OVCAR-4 | 0.0 |
| Ovarian ca. OVCAR-5 | 0.1 |
| Ovarian ca. OVCAR-8 | 0.0 |
| Ovarian ca. IGROV-1 | 0.0 |
| Ovarian ca.* (ascites) SK-OV-3 | 0.2 |
| Uterus | 0.6 |
| Placenta | 0.1 |
| Prostate | 0.3 |
| Prostate ca.* (bone met)PC-3 | 0.1 |
| Testis | 0.8 |
| Melanoma Hs688(A).T | 0.0 |
| Melanoma* (met) Hs688(B).T | 0.0 |
| Melanoma UACC-62 | 0.1 |
| Melanoma M14 | 0.1 |
| Melanoma LOX IMVI | 0.0 |
| Melanoma* (met) SK-MEL-5 | 0.0 |
| Adipose | 0.5 |

[0838] TABLE SC
Panel 5D

| | Rel. Exp. (%) |
|---|---|
| | Ag2073, Run |
| Tissue Name | 169269384 |
| 97457_Patient-02go_adipose | 0.7 |
| 97476_Patient-07sk_skeletal muscle | 7.9 |
| 97477_Patient-07ut_uterus | 0.0 |
| 97478_Patient-07pl_placenta | 0.2 |
| 97481_Patient-08sk_skeletal muscle | 8.7 |
| 97482_Patient-08ut_uterus | 0.1 |
| 97483_Patient-08pl_placenta | 0.1 |
| 97486_Patient-09sk_skeletal muscle | 14.1 |
| 97487_Patient-09ut_uterus | 0.1 |
| 97488_Patient-09pl_placenta | 0.1 |
| 97492_Patient-10ut_uterus | 0.3 |
| 97493_Patient-10pl_placenta | 0.1 |
| 97495_Patient-11go_adipose | 0.2 |
| 97496_Patient-11sk_skeletal muscle | 82.9 |
| 97497_Patient-11ut_uterus | 0.1 |
| 97498_Patient-11pl_placenta | 0.3 |
| 97500_Patient-12go_adipose | 0.5 |
| 97501_Patient-12sk_skeletal muscle | 100.0 |
| 97502_Patient-12ut_uterus | 0.3 |
| 97503_Patient-12pl_placenta | 0.1 |
| 94721_Donor 2 U - A_Mesenchymal Stem Cells | 0.2 |
| 94722_Donor 2 U - B_Mesenchymal Stem Cells | 0.0 |
| 94723_Donor 2 U - C_Mesenchymal Stem Cells | 0.4 |
| 94709_Donor 2 AM - A_adipose | 0.2 |
| 94710_Donor 2 AM - B_adipose | 0.1 |
| 94711_Donor 2 AM - C_adipose | 0.0 |
| 94712_Donor 2 AD - A_adipose | 0.0 |
| 94713_Donor 2 AD - B_adipose | 0.7 |
| 94714_Donor 2 AD - C_adipose | 0.3 |
| 94742_Donor 3 U - A_Mesenchymal Stem Cells | 0.0 |
| 94743_Donor 3 U - B_Mesenchymal Stem Cells | 0.0 |
| 94730_Donor 3 AM - A_adipose | 0.1 |
| 94731_Donor 3 AM - B_adipose | 0.2 |
| 94732_Donor 3 AM - C_adipose | 0.2 |
| 94733_Donor 3 AD - A_adipose | 0.2 |
| 94734_Donor 3 AD - B_adipose | 0.0 |
| 94735_Donor 3 AD - C_adipose | 0.2 |
| 77138_Liver_HepG2untreated | 0.0 |
| 73556_Heart_Cardiac stromal cells (primary) | 0.2 |
| 81735_Small Intestine | 0.4 |
| 72409_Kidney_Proximal Convoluted Tubule | 0.2 |
| 82685 Small intestine_Duodenum | 0.4 |
| 90650_Adrenal_Adrenocortical adenoma | 0.1 |
| 72410_Kidney_HRCE | 0.3 |
| 72411_Kidney_HRE | 0.1 |
| 73139 Uterus_Uterine smooth muscle cells | 0.1 |

[0839] Panel 1.3D Summary: Ag2073 The CG57909-01 gene, a calpain homolog, has low levels of expression in thyroid, pituitary, heart, adipose and liver. Calpain 10 was recently identified as a susceptibility gene for type 2 diabetes. Thus, this gene product may be a small molecule target for the treatment of endocrine and metabolic disease, including the thyroidopathies, Types 1 and 2 diabetes and obesity. In addition, this gene is highly expressed in skeletal muscle. Mutations in the calpain 3 gene have been proven to be responsible for limb-girdle muscular dystrophy (LGMD) type 2A. Thus, therapeutic modulation of this gene product may be a treatment for LGMD type 2A.

[0840] See Chae J, Minami N, Jin Y, Nakagawa M, Murayama K, Igarashi F, Nonaka 1. Calpain 3 gene mutations: genetic and clinico-pathologic findings in limb-girdle muscular dystrophy. Neuromuscul Disord. September 2001;11(6-7):547-55. PMID: 11525884; and Huang Y, Wang KK. The calpain family and human disease. Trends Mol Med. August 2001; 7(8):355-62. Review. PMID: 11516996.

[0841] Panel 4D Summary: Ag2073 Results from one experiment with the CG56003-01 gene are not included. The amp plot indicates that there were experimental difficulties with this run.

[0842] Panel 5D Summary: Ag2073 Expression of the CG57509-01 gene is restricted to skeletal muscle, confirming the results from Panel 1.3D. Please see Panel 1.3D for discussion of this gene in metabolic disease.

[0843] T. CG90474-02: Mitochondrial Uncoupling Protein 2.

[0844] Expression of gene CG90474-02 was assessed using the primer-probe set Ag1693, described in Table TA. Results of the RTQ-PCR runs are shown in Tables TB and TC. Please note that CG90474-02 represents a full-length physical clone.

TABLE TA
Probe Name Ag1693

| | | | Start | SEQ |
|---|---|---|---|---|
| Primers | Sequences | Length | Position | ID No |
| Forward | 5′-cctactgccactgtgaagtttc-3′ | 22 | 154 | 223 |
| Probe | TET-5′-tcgcagatctcatcacctttcctctg-3′-TAMRA | 26 | 200 | 224 |
| Reverse | 5′-ggatctgtaaccggactttagc-3′ | 22 | 232 | 225 |

[0845] TABLE TB
Panel 1.3D

| | Rel. Exp. (%) |
|---|---|
| | Agl693, Run |
| Tissue Name | 157637343 |
| Liver adenocarcinoma | 14.6 |
| Pancreas | 0.9 |
| Pancreatic ca. CAPAN 2 | 4.7 |
| Adrenal gland | 6.2 |
| Thyroid | 15.2 |
| Salivary gland | 7.2 |
| Pituitary gland | 3.5 |
| Brain (fetal) | 0.8 |
| Brain (whole) | 1.7 |
| Brain (amygdala) | 3.2 |
| Brain (cerebellum) | 0.5 |
| Brain (hippocampus) | 7.6 |
| Brain (substantia nigra) | 1.5 |
| Brain (thalamus) | 2.5 |
| Cerebral Cortex | 3.1 |
| Spinal cord | 4.2 |
| glio/astro U87-MG | 2.3 |
| glio/astro U-118-MG | 8.1 |
| astrocytoma SW1783 | 2.6 |
| neuro*; met SK-N-AS | 6.3 |
| astrocytoma SF-539 | 0.4 |
| astrocytoma SNB-75 | 3.3 |
| glioma SNB-19 | 0.4 |
| glioma U251 | 0.8 |
| glioma SF-295 | 0.6 |
| Heart (fetal) | 18.4 |
| Heart | 1.5 |
| Skeletal muscle (fetal) | 100.0 |
| Skeletal muscle | 11.1 |
| Bone marrow | 48.0 |
| Thymus | 28.7 |
| Spleen | 50.3 |
| Lymph node | 21.9 |
| Colorectal | 13.8 |
| Stomach | 7.3 |
| Small intestine | 11.1 |
| Colon ca. SW480 | 8.1 |
| Colon ca.* SW620(SW480 met) | 5.8 |
| Colon ca. HT29 | 18.0 |
| Colon ca. HCT-116 | 1.6 |
| Colon ca. CaCo-2 | 15.1 |
| Colon ca. tissue(ODO3866) | 6.2 |
| Colon ca. HCC-2998 | 7.1 |
| Gastric ca.* (liver met) NCI-N87 | 33.9 |
| Bladder | 1.5 |
| Trachea | 52.1 |
| Kidney | 1.7 |
| Kidney (fetal) | 13.2 |
| Renal ca. 786-0 | 16.2 |
| Renal ca. A498 | 29.7 |
| Renal ca. RXF 393 | 0.2 |
| Renal ca. ACHN | 3.1 |
| Renal ca. UO-31 | 0.5 |
| Renal ca. TK-10 | 6.0 |
| Liver | 1.6 |
| Liver (fetal) | 55.5 |
| Liver ca. (hepatoblast) HepG2 | 4.7 |
| Lung | 20.6 |
| Lung (fetal) | 11.3 |
| Lung ca. (small cell) LX-1 | 3.7 |
| Lung ca. (small cell) NCI-H69 | 26.1 |
| Lung ca. (s. cell var.) SHP-77 | 54.3 |
| Lung ca. (large cell)NCI-H460 | 0.1 |
| Lung ca. (non-sm. cell) A549 | 6.7 |
| Lung ca. (non-s. cell) NCI-H23 | 13.5 |
| Lung ca. (non-s. cell) HOP-62 | 0.6 |
| Lung ca. (non-s. cl) NCI-H522 | 3.4 |
| Lung ca. (squam.) SW 900 | 2.7 |
| Lung ca. (squam.) NCI-H596 | 12.1 |
| Mammary gland | 18.0 |
| Breast ca.* (pl. ef) MCF-7 | 17.1 |
| Breast ca.* (pl. ef) MDA-MB-231 | 41.8 |
| Breast ca.* (pl. ef) T47D | 9.1 |
| Breast ca. BT-549 | 26.8 |
| Breast ca. MDA-N | 4.3 |
| Ovary | 22.5 |
| Ovarian ca. OVCAR-3 | 3.3 |
| Ovarian ca. OVCAR-4 | 11.1 |
| Ovarian ca. OVCAR-5 | 1.5 |
| Ovarian ca. OVCAR-8 | 11.4 |
| Ovarian ca. IGROV-1 | 4.9 |
| Ovarian ca.* (ascites) SK-OV-3 | 3.5 |
| Uterus | 1.6 |
| Placenta | 5.8 |
| Prostate | 4.2 |
| Prostate ca.* (bone met)PC-3 | 3.2 |
| Testis | 5.4 |
| Melanoma Hs688(A).T | 0.4 |
| Melanoma* (met) Hs688(B).T | 0.1 |
| Melanoma UACC-62 | 0.0 |
| Melanoma M14 | 0.9 |
| Melanoma LOX IMVI | 0.2 |
| Melanoma* (met) SK-MEL-5 | 0.7 |
| Adipose | 8.4 |

[0846] TABLE TC
Panel 5D

| | Rel. Exp. (%) |
|---|---|
| | Agl693, Run |
| Tissue Name | 166510712 |
| 97457 Patient-02go adipose | 27.7 |
| 97476_Patient-07sk_skeletal muscle | 19.3 |
| 97477_Patient-07ut_uterus | 9.1 |
| 97478_Patient-07pl_placenta | 16.3 |
| 97481_Patient-08sk_skeletal muscle | 8.4 |
| 97482_Patient-08ut_uterus | 8.8 |
| 97483_Patient-08pl_placenta | 15.2 |
| 97486_Patient-09sk_skeletal muscle | 7.9 |
| 97487_Patient-09ut_uterus | 5.8 |
| 97488_Patient-09pl_placenta | 7.5 |
| 97492_Patient-10ut_uterus | 11.8 |
| 97493_Patient-10pl_placenta | 32.3 |
| 97495_Patient-11go_adipose | 49.7 |
| 97496_Patient-11sk_skeletal muscle | 30.8 |
| 97497_Patient-11ut_uterus | 26.8 |
| 97498_Patient-11pl_placenta | 15.2 |
| 97500_Patient-12go_adipose | 55.5 |
| 97501_Patient-12sk_skeletal muscle | 56.3 |
| 97502_Patient-12ut_uterus | 18.0 |
| 97503_Patient-12pl_placenta | 19.5 |
| 94721_Donor2 U - A_Mesenchymal Stem Cells | 0.5 |
| 94722_Donor2 U - B_Mesenchymal Stem Cells | 0.3 |
| 94723_Donor 2 U - C_Mesenchymal Stem Cells | 0.8 |
| 94709_Donor 2 AM - A_adipose | 1.7 |
| 94710_Donor 2 AM - B_adipose | 0.7 |
| 94711_Donor 2 AM - C_adipose | 0.3 |
| 94712_Donor 2 AD - A_adipose | 11.5 |
| 94713_Donor 2 AD - B_adipose | 17.3 |
| 94714_Donor 2 AD - C_adipose | 10.6 |
| 94742_Donor 3 U - A_Mesenchymal Stem Cells | 0.4 |
| 94743_Donor 3 U - B_Mesenchymal Stem Cells | 1.1 |
| 94730_Donor 3 AM - A_adipose | 1.8 |
| 94731_Donor 3 AM - B_adipose | 0.4 |
| 94732_Donor 3 AM - C_adipose | 0.5 |
| 94733_Donor 3 AD - A_adipose | 5.0 |
| 94734_Donor 3 AD - B_adipose | 3.3 |
| 94735_Donor 3 AD - C_adipose | 4.1 |
| 77138_Liver_HepG2untreated | 23.5 |
| 73556_Heart_Cardiac stromal cells (primary) | 2.0 |
| 81735_Small Intestine | 32.5 |
| 72409_Kidney_Proximal Convoluted Tubule | 5.3 |
| 82685_Small intestine_Duodenum | 25.2 |
| 90650_Adrenal_Adrenocortical adenoma | 4.8 |
| 72410_Kidney_HRCE | 60.3 |
| 72411_Kidney_HRE | 100.0 |
| 73139_Uterus_Uterine smooth muscle cells | 0.6 |

[0847] Panel 1.3D Summary: Ag1693 Highest expression of this gene is seen in skeletal muscle (CT=26.2). This gene is also expressed at low but significant levels in pituitary, adipose, adrenal gland, pancreas, thyroid, and adult and fetal skeletal muscle, heart, and liver. This widespread expression among these tissues suggests that this gene product may play a role in normal neuroendocrine and metabolic function and that disregulated expression of this gene may contribute to neuroendocrine disorders or metabolic diseases, such as obesity and diabetes.

[0848] In addition, this gene is expressed at much higher levels in fetal heart, liver and skeletal muscle tissue (CTs=26-28) when compared to expression in the adult counterpart (CTs=30-32). Thus, expression of this gene may be used to differentiate between the fetal and adult source of these tissues. In addition, the relative overexpression of this gene in fetal heart, liver, and skeletal muscle suggests that the protein product may enhance the growth or development of these organs in the fetus and thus may also act in a regenerative capacity in the adult. Therefore, therapeutic modulation of the protein encoded by this gene could be useful in treatment of liver, heart, and muscle related diseases.

[0849] This gene is widely expressed in this panel, with moderate to levels of expression seen in brain, colon, gastric, lung, breast, ovarian, and melanoma cancer cell lines. This expression profile suggests a role for this gene product in cell survival and proliferation. Modulation of this gene product may be useful in the treatment of cancer.

[0850] This gene is also expressed at moderate to levels in the CNS, including the hippocampus, thalamus, substantia nigra, amygdala, cerebellum and cerebral cortex. Therefore, therapeutic modulation of the expression or function of this gene may be useful in the treatment of neurologic disorders, such as Alzheimer's disease, Parkinson's disease, schizophrenia, multiple sclerosis, stroke and epilepsy.

[0851] Panel 5D Summary: Ag1693 Highest expression is seen in a kidney cell line (CT=28.7). Moderate levels of expression are also seen in metabolic tissues such as adipose, placenta, and skeletal muscle. Please see Panel 1.3D for discussion of this gene in metabolic disease.

[0852] U. CG159399-01: CRAL/TRIO Containing Protein.

[0853] Expression of gene CG159399-01 was assessed using the primer-probe set Ag2893, described in Table UA. Results of the RTQ-PCR runs are shown in Tables UB, UC, UD, UE and UF.

TABLE UA
Probe Name Ag2893

| | | | Start | SEQ |
|---|---|---|---|---|
| Primers | Sequences | Length | Position | ID No |
| Forward | 5′-gcccaatcctgatgactacttc-3′ | 22 | 39 | 226 |
| Probe | TET-5′-ctccaagctcggagctttgacctg-3′-TAMRA | 24 | 73 | 227 |
| Reverse | 5′-ctcagcatgtcctctgatttct-3′ | 22 | 98 | 228 |

[0854] TABLE UB
CNS_neurodegeneration_v1.0

| | Rel. Exp. (%) |
|---|---|
| | Ag2893, Run |
| Tissue Name | 224116295 |
| AD 1 Hippo | 18.6 |
| AD 2 Hippo | 59.0 |
| AD 3 Hippo | 25.3 |
| AD 4 Hippo | 56.3 |
| AD 5 Hippo | 95.9 |
| AD 6 Hippo | 86.5 |
| Control 2 Hippo | 26.1 |
| Control 4 Hippo | 59.5 |
| Control (Path) 3 Hippo | 17.3 |
| AD 1 Temporal Ctx | 48.6 |
| AD 2 Temporal Ctx | 61.1 |
| AD 3 Temporal Ctx | 25.2 |
| AD 4 Temporal Ctx | 70.7 |
| AD 5 Inf Temporal Ctx | 100.0 |
| AD 5 Sup Temporal Ctx | 55.9 |
| AD 6 Inf Temporal Ctx | 86.5 |
| AD 6 Sup Temporal Ctx | 92.7 |
| Control 1 Temporal Ctx | 24.7 |
| Control 2 Temporal Ctx | 53.2 |
| Control 3 Temporal Ctx | 26.8 |
| Control 3 Temporal Ctx | 40.6 |
| Control (Path) 1 Temporal Ctx | 63.7 |
| Control (Path) 2 Temporal Ctx | 44.1 |
| Control (Path) 3 Temporal Ctx | 15.8 |
| Control (Path) 4 Temporal Ctx | 43.5 |
| AD 1 Occipital Ctx | 41.8 |
| AD 2 Occipital Ctx (Missing) | 0.0 |
| AD 3 Occipital Ctx | 27.5 |
| AD 4 Occipital Ctx | 58.6 |
| AD 5 Occipital Ctx | 47.0 |
| AD 6 Occipital Ctx | 31.2 |
| Control 1 Occipital Ctx | 20.9 |
| Control 2 Occipital Ctx | 63.7 |
| Control 3 Occipital Ctx | 62.0 |
| Control 4 Occipital Ctx | 28.1 |
| Control (Path) 1 Occipital Ctx | 82.9 |
| Control (Path) 2 Occipital Ctx | 24.5 |
| Control (Path) 3 Occipital Ctx | 15.0 |
| Control (Path) 4 Occipital Ctx | 28.3 |
| Control 1 Parietal Ctx | 20.4 |
| Control 2 Parietal Ctx | 55.1 |
| Control 3 Parietal Ctx | 30.4 |
| Control (Path) 1 Parietal Ctx | 74.2 |
| Control (Path) 2 Parietal Ctx | 35.8 |
| Control (Path) 3 Parietal Ctx | 6.9 |
| Control (Path) 4 Parietal Ctx | 38.4 |

[0855] TABLE UC
Panel 1.3D

| | Rel. Exp. (%) | Rel. Exp. (%) |
|---|---|---|
| | Ag2893, Run | Ag2893, Run |
| Tissue Name | 160944329 | 165701489 |
| Liver adenocarcinoma | 0.0 | 0.0 |
| Pancreas | 2.5 | 4.0 |
| Pancreatic ca. CAPAN 2 | 0.0 | 0.0 |
| Adrenal gland | 0.8 | 1.2 |
| Thyroid | 0.5 | 0.3 |
| Salivary gland | 0.0 | 0.0 |
| Pituitary gland | 2.0 | 1.8 |
| Brain (fetal) | 0.9 | 2.0 |
| Brain (whole) | 3.6 | 6.3 |
| Brain (amygdala) | 3.6 | 6.1 |
| Brain (cerebellum) | 6.3 | 6.2 |
| Brain (hippocampus) | 9.3 | 10.4 |
| Brain (Substantia nigra) | 2.6 | 5.4 |
| Brain (thalamus) | 7.2 | 13.8 |
| Cerebral Cortex | 25.5 | 3.3 |
| Spinal cord | 17.0 | 10.7 |
| glio/astro U87-MG | 0.0 | 0.0 |
| glio/astro U-118-MG | 0.0 | 0.0 |
| astrocytoma SW1783 | 0.6 | 0.0 |
| neuro*; met SK-N-AS | 0.0 | 0.0 |
| astrocytoma SF-539 | 0.0 | 0.0 |
| astrocytoma SNB-75 | 0.0 | 0.0 |
| glioma SNB-19 | 0.0 | 0.0 |
| glioma U251 | 0.0 | 0.0 |
| glioma SF-295 | 0.0 | 0.0 |
| Heart (fetal) | 1.4 | 0.0 |
| Heart | 0.0 | 0.0 |
| Skeletal muscle (fetal) | 3.3 | 0.0 |
| Skeletal muscle | 0.4 | 0.0 |
| Bone marrow | 0.0 | 0.3 |
| Thymus | 1.4 | 0.2 |
| Spleen | 1.7 | 0.6 |
| Lymph node | 0.0 | 1.1 |
| Colorectal | 0.0 | 0.0 |
| Stomach | 0.0 | 2.0 |
| Small intestine | 0.0 | 2.3 |
| Colon ca. SW480 | 2.3 | 0.5 |
| Colon ca.* SW620(SW480 met) | 0.0 | 0.6 |
| Colon ca. HT29 | 0.0 | 0.0 |
| Colon ca. HCT-116 | 0.0 | 0.0 |
| Colon ca. CaCo-2 | 0.9 | 0.0 |
| Colon ca. tissue(ODO3866) | 1.5 | 0.0 |
| Colon ca. HCC-2998 | 0.0 | 0.0 |
| Gastric ca.* (liver met) | 0.0 | 0.6 |
| NCI-N87 | | |
| Bladder | 11.3 | 5.0 |
| Trachea | 2.5 | 0.0 |
| Kidney | 26.2 | 5.3 |
| Kidney (fetal) | 19.5 | 4.3 |
| Renal ca. 786-0 | 73.7 | 64.2 |
| Renal ca. A498 | 0.5 | 0.6 |
| Renal ca. RXF 393 | 100.0 | 100.0 |
| Renal ca. ACHN | 28.1 | 18.8 |
| Renal ca. UO-31 | 23.5 | 24.3 |
| Renal ca. TK-10 | 21.2 | 8.9 |
| Liver | 0.0 | 1.3 |
| Liver (fetal) | 1.2 | 1.6 |
| Liver ca. (hepatoblast) | 10.9 | 8.1 |
| HepG2 | | |
| Lung | 8.9 | 4.8 |
| Lung (fetal) | 6.6 | 3.6 |
| Lung ca. (small cell) LX-1 | 0.0 | 0.0 |
| Lung ca. (small cell) | 0.0 | 0.0 |
| NCI-H69 | | |
| Lung ca. (s. cell var.) | 0.0 | 0.0 |
| SHP-77 | | |
| Lung ca. (large cell) | 0.0 | 0.0 |
| NCI-H460 | | |
| Lung ca. (non-sm. cell) | 0.0 | 0.0 |
| A549 | | |
| Lung ca. (non-s. cell) | 2.3 | 1.1 |
| NCI-H23 | | |
| Lung ca. (non-s. cell) | 3.6 | 2.5 |
| HOP-62 | | |
| Lung ca. (non-s. cl) | 0.0 | 0.0 |
| NCI-H522 | | |
| Lung ca. (squam.) SW 900 | 0.0 | 2.4 |
| Lung ca. (squam.) NCI-H596 | 0.8 | 0.0 |
| Mammary gland | 0.5 | 0.0 |
| Breast ca.* (pl. ef) | 0.0 | 0.0 |
| MCF-7 | | |
| Breast ca.* (pl. ef) | 0.4 | 1.7 |
| MDA-MB-231 | | |
| Breast ca.* (pl. ef) | 4.8 | 0.9 |
| T47D | | |
| Breast ca. BT-549 | 0.0 | 0.0 |
| Breast ca. MDA-N | 0.0 | 0.0 |
| Ovary | 9.9 | 2.4 |
| Ovarian ca. OVCAR-3 | 3.2 | 2.2 |
| Ovarian ca. OVCAR-4 | 0.0 | 0.0 |
| Ovarian ca. OVCAR-5 | 0.0 | 0.0 |
| Ovarian ca. OVCAR-8 | 1.0 | 1.2 |
| Ovarian ca. IGROV-1 | 0.0 | 0.0 |
| Ovarian ca.* (ascites) | 0.0 | 0.0 |
| SK-OV-3 | | |
| Uterus | 1.9 | 5.4 |
| Placenta | 0.5 | 0.9 |
| Prostate | 1.0 | 1.0 |
| Prostate ca.* (bone met) | 0.0 | 0.0 |
| PC-3 | | |
| Testis | 25.7 | 9.3 |
| Melanoma Hs688(A).T | 0.0 | 0.0 |
| Melanoma* (met) Hs688(B).T | 0.0 | 0.0 |
| Melanoma UACC-62 | 0.0 | 0.0 |
| Melanoma M14 | 0.0 | 0.0 |
| Melanoma LOX IMVI | 0.0 | 0.0 |
| Melanoma* (met) SK-MEL-5 | 0.0 | 0.0 |
| Adipose | 1.0 | 0.0 |

[0856] TABLE UD
Panel 2D

| | Rel. Exp. (%) |
|---|---|
| | Ag2893, Run |
| Tissue Name | 160966072 |
| Normal Colon | 2.5 |
| CC Well to Mod Diff (ODO3866) | 0.0 |
| CC Margin (ODO3866) | 0.5 |
| CC Gr.2 rectosigmoid (ODO3868) | 0.0 |
| CC Margin (ODO3868) | 0.0 |
| CC Mod Diff (ODO3920) | 0.5 |
| CC Margin (ODO3920) | 0.4 |
| CC Gr.2 ascend colon (ODO3921) | 0.5 |
| CC Margin (ODO3921) | 0.0 |
| CC from Partial Hepatectomy (ODO4309) Mets | 0.7 |
| Liver Margin (ODO4309) | 0.9 |
| Colon mets to lung (OD04451-01) | 5.0 |
| Lung Margin (OD04451-02) | 18.0 |
| Normal Prostate 6546-1 | 0.7 |
| Prostate Cancer (OD04410) | 2.0 |
| Prostate Margin (OD04410) | 8.7 |
| Prostate Cancer (OD04720-01) | 3.8 |
| Prostate Margin (OD04720-02) | 3.5 |
| Normal Lung 061010 | 12.9 |
| Lung Met to Muscle (ODO4286) | 0.0 |
| Muscle Margin (ODO4286) | 0.3 |
| Lung Malignant Cancer (OD03126) | 8.7 |
| Lung Margin (OD03126) | 21.0 |
| Lung Cancer (OD04404) | 8.0 |
| Lung Margin (OD04404) | 28.7 |
| Lung Cancer (OD04565) | 0.7 |
| Lung Margin (OD04565) | 33.0 |
| Lung Cancer (OD04237-01) | 1.3 |
| Lung Margin (OD04237-02) | 11.3 |
| Ocular Mel Met to Liver (ODO4310) | 0.0 |
| Liver Margin (ODO4310) | 0.4 |
| Melanoma Mets to Lung (OD04321) | 1.0 |
| Lung Margin (OD04321) | 32.1 |
| Normal Kidney | 42.0 |
| Kidney Ca, Nuclear grade 2 (OD04338) | 55.5 |
| Kidney Margin (OD04338) | 40.9 |
| Kidney Ca Nuclear grade 1/2 (OD04339) | 61.1 |
| Kidney Margin (OD04339) | 22.8 |
| Kidney Ca, Clear cell type (OD04340) | 100.0 |
| Kidney Margin (OD04340) | 31.9 |
| Kidney Ca, Nuclear grade 3 (OD04348) | 3.3 |
| Kidney Margin (OD04348) | 27.0 |
| Kidney Cancer (OD04622-01) | 30.4 |
| Kidney Margin (OD04622-03) | 17.4 |
| Kidney Cancer (OD04450-01) | 21.5 |
| Kidney Margin (OD04450-03) | 21.3 |
| Kidney Cancer 8120607 | 70.7 |
| Kidney Margin 8120608 | 16.8 |
| Kidney Cancer 8120613 | 0.0 |
| Kidney Margin 8120614 | 18.0 |
| Kidney Cancer 9010320 | 74.7 |
| Kidney Margin 9010321 | 18.3 |
| Normal Uterus | 0.7 |
| Uterus Cancer 064011 | 10.8 |
| Normal Thyroid | 0.0 |
| Thyroid Cancer 064010 | 1.7 |
| Thyroid Cancer A302152 | 3.4 |
| Thyroid Margin A302153 | 0.0 |
| Normal Breast | 2.0 |
| Breast Cancer (OD04566) | 0.2 |
| Breast Cancer (OD04590-01) | 0.2 |
| Breast Cancer Mets (OD04590-03) | 0.8 |
| Breast Cancer Metastasis (OD04655-05) | 0.6 |
| Breast Cancer 064006 | 0.3 |
| Breast Cancer 1024 | 0.5 |
| Breast Cancer 9100266 | 0.5 |
| Breast Margin 9100265 | 1.1 |
| Breast Cancer A209073 | 0.2 |
| Breast Margin A209073 | 0.4 |
| Normal Liver | 0.0 |
| Liver Cancer 064003 | 0.8 |
| Liver Cancer 1025 | 0.4 |
| Liver Cancer 1026 | 8.1 |
| Liver Cancer 6004-T | 1.2 |
| Liver Tissue 6004-N | 0.0 |
| Liver Cancer 6005-T | 5.4 |
| Liver Tissue 6005-N | 0.3 |
| Normal Bladder | 17.3 |
| Bladder Cancer 1023 | 0.2 |
| Bladder Cancer A302173 | 1.3 |
| Bladder Cancer (OD04718-01) | 7.9 |
| Bladder Normal Adjacent (OD04718-03) | 0.4 |
| Normal Ovary | 2.0 |
| Ovarian Cancer 064008 | 10.7 |
| Ovarian Cancer (OD04768-07) | 0.3 |
| Ovary Margin (OD04768-08) | 4.2 |
| Normal Stomach | 3.1 |
| Gastric Cancer 9060358 | 0.4 |
| Stomach Margin 9060359 | 1.1 |
| Gastric Cancer 9060395 | 0.2 |
| Stomach Margin 9060394 | 3.0 |
| Gastric Cancer 9060397 | 0.2 |
| Stomach Margin 9060396 | 2.6 |
| Gastric Cancer 064005 | 0.8 |

[0857] TABLE UE
Panel 3D

| | Rel. Exp. (%) |
|---|---|
| | Ag2893, Run |
| Tissue Name | 165924139 |
| Daoy- Medulloblastoma | 2.0 |
| TE671- Medulloblastoma | 0.0 |
| D283 Med- Medulloblastoma | 0.0 |
| PFSK-1- Primitive Neuroectodermal | 0.0 |
| XF-498- CNS | 0.0 |
| SNB-78- Glioma | 0.0 |
| SF-268- Glioblastoma | 0.9 |
| T98G- Glioblastoma | 0.0 |
| SK-N-SH- Neuroblastoma (metastasis) | 0.0 |
| SF-295- Glioblastoma | 0.0 |
| Cerebellum | 6.4 |
| Cerebellum | 9.9 |
| NCI-H292- Mucoepidermoid lung carcinoma | 2.0 |
| DMS-114- Small cell lung cancer | 0.0 |
| DMS-79- Small cell lung cancer | 1.4 |
| NCI-H146- Small cell lung cancer | 0.0 |
| NCI-H526- Small cell lung cancer | 4.5 |
| NCI-N417- Small cell lung cancer | 0.0 |
| NCI-H82- Small cell lung cancer | 0.0 |
| NCI-H157- Squamous cell lung cancer | 0.0 |
| (metastasis) | |
| NCI-HI 155- Large cell lung cancer | 0.0 |
| NCI-H1299- Large cell lung cancer | 0.0 |
| NCI-H727- Lung carcinoid | 0.0 |
| NCI-UMC-11- Lung carcinoid | 0.0 |
| LX-1- Small cell lung cancer | 0.0 |
| Colo-205- Colon cancer | 0.0 |
| KM12- Colon cancer | 0.0 |
| KM20L2- Colon cancer | 0.0 |
| NCI-H716- Colon cancer | 0.0 |
| SW-48- Colon adenocarcinoma | 0.0 |
| SW1116- Colon adenocarcinoma | 0.0 |
| LS 174T- Colon adenocarcinoma | 0.0 |
| SW-948- Colon adenocarcinoma | 0.0 |
| SW-480- Colon adenocarcinoma | 0.0 |
| NCI-SNU-5- Gastric carcinoma | 9.7 |
| KATO III- Gastric carcinoma | 0.0 |
| NCI-SNU-16- Gastric carcinoma | 0.0 |
| NCI-SNU-1- Gastric carcinoma | 0.0 |
| RF-1- Gastric adenocarcinoma | 0.0 |
| RF-48- Gastric adenocarcinoma | 0.0 |
| MKN-45- Gastric carcinoma | 0.0 |
| NCI-N87- Gastric carcinoma | 0.0 |
| OVCAR-5- Ovarian carcinoma | 0.0 |
| RL95-2- Uterine carcinoma | 0.0 |
| HelaS3- Cervical adenocarcinoma | 0.0 |
| Ca Ski- Cervical epidermoid carcinoma | 0.0 |
| (metastasis) | |
| ES-2- Ovarian clear cell carcinoma | 0.0 |
| Ramos- Stimulated with PMA/ionomycin 6 h | 0.0 |
| Ramos- Stimulated with PMA/ionomycin 14 h | 0.0 |
| MEG-01- Chronic myelogenous leukemia | 0.0 |
| (megokaryoblast) | |
| Raji- Burkitt's lymphoma | 0.0 |
| Daudi- Burkitt's lymphoma | 0.0 |
| U266- B-cell plasmacytoma | 0.0 |
| CA46- Burkitt's lymphoma | 0.0 |
| RL- non-Hodgkin's B-cell lymphoma | 0.0 |
| JM1- pre-B-cell lymphoma | 0.0 |
| Jurkat- T cell leukemia | 0.0 |
| TF-1- Erythroleukemia | 0.0 |
| HUT 78- T-cell lymphoma | 0.0 |
| U937- Histiocytic lymphoma | 0.0 |
| KU-812- Myelogenous leukemia | 0.0 |
| 769-P- Clear cell renal carcinoma | 7.7 |
| Caki-2- Clear cell renal carcinoma | 100.0 |
| SW 839- Clear cell renal carcinoma | 73.2 |
| Rhabdoid kidney tumor | 0.0 |
| Hs766T- Pancreatic carcinoma (LN metastasis) | 0.0 |
| CAPAN-1- Pancreatic adenocarcinoma | 5.3 |
| (liver metastasis) | |
| SU86.86- Pancreatic carcinoma (liver metastasis) | 1.3 |
| BxPC-3- Pancreatic adenocarcinoma | 0.0 |
| HP AC- Pancreatic adenocarcinoma | 0.0 |
| MIA PaCa-2- Pancreatic carcinoma | 0.0 |
| CFPAC-1- Pancreatic ductal adenocarcinoma | 1.6 |
| PANC-1- Pancreatic epithelioid ductal carcinoma | 0.0 |
| T24- Bladder carcinma (transitional cell) | 0.0 |
| 5637- Bladder carcinoma | 0.0 |
| HT-1197- Bladder carcinoma | 0.0 |
| UM-UC-3- Bladder carcinma (transitional cell) | 0.0 |
| A204- Rhabdomyosarcoma | 0.0 |
| HT-1080- Fibrosarcoma | 0.0 |
| MG-63- Osteosarcoma | 0.0 |
| SK-LMS-1- Leiomyosarcoma (vulva) | 0.0 |
| SJRH30- Rhabdomyosarcoma (met to bone marrow) | 0.0 |
| A431- Epidermoid carcinoma | 0.0 |
| WM266-4- Melanoma | 0.0 |
| DU 145- Prostate carcinoma (brain metastasis) | 0.0 |
| MDA-MB-468- Breast adenocarcinoma | 0.0 |
| SCC-4- Squamous cell carcinoma of tongue | 0.0 |
| SCC-9- Squamous cell carcinoma of tongue | 0.0 |
| SCO 15- Squamous cell carcinoma of tongue | 0.0 |
| CAL 27- Squamous cell carcinoma of tongue | 0.0 |

[0858] TABLE UF
Panel 4D

| | Rel. Exp. (%) |
|---|---|
| | Ag2893, Run |
| Tissue Name | 159633002 |
| Secondary Th1 act | 0.0 |
| Secondary Th2 act | 0.0 |
| Secondary Tr1 act | 0.0 |
| Secondary Th1 rest | 0.0 |
| Secondary Th2 rest | 1.2 |
| Secondary Tr1 rest | 0.0 |
| Primary Th1 act | 0.0 |
| Primary Th2 act | 0.0 |
| Primary Tr1 act | 0.0 |
| Primary Th1 rest | 0.0 |
| Primary Th2 rest | 0.7 |
| Primary Tr1 rest | 0.0 |
| CD45RA CD4 lymphocyte act | 0.0 |
| CD45RO CD4 lymphocyte act | 0.3 |
| CD8 lymphocyte act | 0.0 |
| Secondary CD8 lymphocyte rest | 0.2 |
| Secondary CD8 lymphocyte act | 0.0 |
| CD4 lymphocyte none | 0.0 |
| 2ry Th1/Th2/Tr1_anti-CD95 CH11 | 0.8 |
| LAK cells rest | 1.0 |
| LAK cells IL-2 | 0.0 |
| LAK cells IL-2 + IL-12 | 0.4 |
| LAK cells IL-2 + IFN gamma | 0.0 |
| LAK cells IL-2 + IL-18 | 0.0 |
| LAK cells PMA/ionomycin | 0.0 |
| NK Cells IL-2 rest | 0.0 |
| Two Way MLR 3 day | 0.0 |
| Two Way MLR 5 day | 0.0 |
| Two Way MLR 7 day | 0.0 |
| PBMC rest | 0.3 |
| PBMC PWM | 0.4 |
| PBMC PHA-L | 0.0 |
| Ramos (B cell) none | 0.0 |
| Ramos (B cell) ionomycin | 0.0 |
| B lymphocytes PWM | 0.8 |
| B lymphocytes CD40L and IL-4 | 0.6 |
| EOL-1 dbcAMP | 0.0 |
| EOL-1 dbcAMP PMA/ionomycin | 0.0 |
| Dendritic cells none | 0.0 |
| Dendritic cells LPS | 0.0 |
| Dendritic cells anti-CD40 | 0.0 |
| Monocytes rest | 0.0 |
| Monocytes LPS | 0.0 |
| Macrophages rest | 0.0 |
| Macrophages LPS | 0.0 |
| HUVEC none | 0.0 |
| HUVEC starved | 0.0 |
| HUVEC IL-1beta | 0.0 |
| HUVEC IFN gamma | 0.0 |
| HUVEC TNF alpha + IFN gamma | 0.0 |
| HUVEC TNF alpha + IL4 | 0.0 |
| HUVEC IL-11 | 0.0 |
| Lung Microvascular EC none | 0.0 |
| Lung Microvascular EC TNFalpha + IL-1beta | 0.0 |
| Microvascular Dermal EC none | 0.0 |
| Microsvasular Dermal EC TNFalpha + IL-1beta | 0.0 |
| Bronchial epithelium TNFalpha + IL1beta | 0.0 |
| Small airway epithelium none | 1.7 |
| Small airway epithelium TNFalpha + IL-1beta | 3.0 |
| Coronery artery SMC rest | 0.0 |
| Coronery artery SMC TNFalpha + IL-1beta | 0.0 |
| Astrocytes rest | 4.4 |
| Astrocytes TNFalpha + IL-1beta | 5.8 |
| KU-812 (Basophil) rest | 0.0 |
| KU-812 (Basophil) PMA/ionomycin | 0.0 |
| CCD1106 (Keratinocytes) none | 0.0 |
| CCD1106 (Keratinocytes) TNFalpha + IL-1beta | 0.0 |
| Liver cirrhosis | 12.7 |
| Lupus kidney | 18.6 |
| NCI-H292 none | 6.5 |
| NCI-H292 IL-4 | 5.6 |
| NCI-H292 IL-9 | 6.8 |
| NCI-H292 IL-13 | 3.6 |
| NCI-H292 IFN gamma | 2.9 |
| HPAEC none | 0.0 |
| HPAEC TNF alpha + IL-1 beta | 0.0 |
| Lung fibroblast none | 0.0 |
| Lung fibroblast TNF alpha + IL-1 beta | 0.0 |
| Lung fibroblast IL-4 | 0.0 |
| Lung fibroblast IL-9 | 0.0 |
| Lung fibroblast IL-13 | 0.0 |
| Lung fibroblast IFN gamma | 0.0 |
| Dermal fibroblast CCD1070 rest | 0.7 |
| Dermal fibroblast CCD1070 TNF alpha | 0.0 |
| Dermal fibroblast CCD1070 IL-1 beta | 0.0 |
| Dermal fibroblast IFN gamma | 0.0 |
| Dermal fibroblast IL-4 | 0.0 |
| IBD Colitis 2 | 0.0 |
| IBD Crohn's | 1.2 |
| Colon | 0.8 |
| Lung | 34.2 |
| Thymus | 100.0 |
| Kidney | 0.0 |

[0859] CNS_neurodegeneration_v1.0 Summary: Ag2893 This panel does not show differential expression of this gene in Alzheimer's disease. However, this expression profile confirms the presence of this gene in the brain. Please see Panel 1.3D for discussion of this gene in the central nervous system.

[0860] Panel 1.3D Summary: Ag2893 Two experiments with the same probe and primer set produce results that are in excellent agreement, with highest expression of this gene in a renal cancer cell line (CTs=28-30). Significant expression is also seen in a cluster of renal cancer cell lines. Thus, expression of this gene could be used to differentiate between this sample and other samples on this panel and as a marker to detect the presence of renal cancer. Furthermore, therapeutic modulation of the expression or function of this gene may be effective in the treatment of renal cancer.

[0861] This gene is also expressed at low, but significant levels in the brain. Expression of this gene in the cerebral cortex suggests a role in CNS-specific processes. Homology to the tocopherol-associated protein (TAP) transcription factor suggests a role for this gene in tocopherol mediated gene transcription. Tocopherol is an essential vitamin involved in many CNS processes that may be mediated by both its antioxidant properties and ability to regulate gene transcription via this gene. Genetic disruption of tocopherol processing results in tocopherol deficiency and CNS disorders such as ataxia and neurodegeneration. Agents that modulate this gene or its protein product may thus be useful in the treatment of ataxia and neurodegenerative diseases.

[0862] See Yamauchi J, Iwamoto T, Kida S, Masushige S, Yamada K, Esashi T. Tocopherol-associated protein is a ligand-dependent transcriptional activator. Biochem Biophys Res Commun Jul. 13, 2001;285(2):295-9; and Yokota T, Igarashi K, Uchihara T, Jishage K, Tomita H, Inaba A, Li Y, Arita M, Suzuki H, Mizusawa H, Arai H. Delayed-onset ataxia in mice lacking alpha-tocopherol transfer protein: model for neuronal degeneration caused by chronic oxidative stress. Proc Natl Acad Sci USA 2001 Dec 18;98(26):15185-90.

[0863] Panel 2D Summary: Ag2893 Highest expression of this gene is seen in a sample derived from a kidney cancer cell line (CT=29.5). In addition, this sample is more highly expressed in kidney cancer than in adjacent normal tissue. Thus, expression of this gene could be used to differentiate between this sample and other samples on this panel and as a marker to detect the presence of kidney cancer. Furthermore, therapeutic modulation of the expression or function of this gene may be effective in the treatment of kidney cancer.

[0864] Panel 3D Summary: Ag2893 Expression of this gene is detected primarily in samples derived from kidney cancer cell lines(CTs=30). Thus, expression of this gene could be used to differentiate between these samples and other samples on this panel and as a marker to detect the presence of kidney cancer. Furthermore, therapeutic modulation of the expression or function of this gene may be effective in the treatment of kidney cancer.

[0865] Panel 4D Summary: Ag2893 This gene is expressed at low but significant levels in the lung and thymus and in lupus kidney and cirrhotic liver. Thus, the transcript or the protein it encodes could be used for detection of these tissues. The expression of this gene suggests that the protein encoded by this transcript may play an important role in the normal homeostasis of the thymus and lung tissues. Therefore, therapeutics designed with the protein encoded by this transcript could be important for modulating T cell development in the thymus and for maintaining or restoring normal function to these lung during inflammation due to diseases such as asthma and emphysema. Additionally, induction of this transcript in other tissues such as the kidney and liver may be detrimental and antagonistic therapies designed with the protein encoded for by this transcript could be important in the treatment of diseases of these tissues.

### Example D

### Identification of Single Nucleotide Polymorphisms in NOVX nucleic Acid Sequences

[0866] Variant sequences are also included in this application. A variant sequence can include a single nucleotide polymorphism (SNP). A SNP can, in some instances, be referred to as a “cSNP” to denote that the nucleotide sequence containing the SNP originates as a cDNA. A SNP can arise in several ways. For example, a SNP may be due to a substitution of one nucleotide for another at the polymorphic site. Such a substitution can be either a transition or a transversion. A SNP can also arise from a deletion of a nucleotide or an insertion of a nucleotide, relative to a reference allele. In this case, the polymorphic site is a site at which one allele bears a gap with respect to a particular nucleotide in another allele. SNPs occurring within genes may result in an alteration of the amino acid encoded by the gene at the position of the SNP. Intragenic SNPs may also be silent, when a codon including a SNP encodes the same amino acid as a result of the redundancy of the genetic code. SNPs occurring outside the region of a gene, or in an intron within a gene, do not result in changes in any amino acid sequence of a protein but may result in altered regulation of the expression pattern. Examples include alteration in temporal expression, physiological response regulation, cell type expression regulation, intensity of expression, and stability of transcribed message.

[0867] SeCalling assemblies produced by the exon linking process were selected and extended using the following criteria. Genomic clones having regions with 98% identity to all or part of the initial or extended sequence were identified by BLASTN searches using the relevant sequence to query human genomic databases. The genomic clones that resulted were selected for further analysis because this identity indicates that these clones contain the genomic locus for these SeqCalling assemblies. These sequences were analyzed for putative coding regions as well as for similarity to the known DNA and protein sequences. Programs used for these analyses include Grail, Genscan, BLAST, HMMER, FASTA, Hybrid and other relevant programs.

[0868] Some additional genomic regions may have also been identified because selected SeqCalling assemblies map to those regions. Such SeqCalling sequences may have overlapped with regions defined by homology or exon prediction. They may also be included because the location of the fragment was in the vicinity of genomic regions identified by similarity or exon prediction that had been included in the original predicted sequence. The sequence so identified was manually assembled and then may have been extended using one or more additional sequences taken from CuraGen Corporation's human SeqCalling database. SeqCalling fragments suitable for inclusion were identified by the CuraTools™ program SeqExtend or by identifying SeqCalling fragments mapping to the appropriate regions of the genomic clones analyzed.

[0869] The regions defined by the procedures described above were then manually integrated and corrected for apparent inconsistencies that may have arisen, for example, from miscalled bases in the original fragments or from discrepancies between predicted exon junctions, EST locations and regions of sequence similarity, to derive the final sequence disclosed herein. When necessary, the process to identify and analyze SeqCalling assemblies and genomic clones was reiterated to derive the full length sequence (Alderborn et al., Determination of Single Nucleotide Polymorphisms by Real-time Pyrophosphate DNA Sequencing. Genome Research. 10 (8) 1249-1265, 2000).

[0870] Variants are reported individually but any combination of all or a select subset of variants are also included as contemplated NOVX embodiments of the invention.

[0871] NOV2b SNP Data (CG112559-02)

[0872] Two polymorphic variants of NOV2b have been identified and are shown in Table SNP1.

TABLE SNP1
Variants of NOV2b.

| | Nucleotides | | | Amino Acids | | |
|---|---|---|---|---|---|---|
| Variant | Position | Initial | Modified | Position | Initial | Modified |
| 13381923 | 285 | C | T | 0 | | |
| c110.5085 | 475 | A | T | 0 | | |

[0873] NOV3b SNP Data (CG115757-02)

[0874] One polymorphic variant of NOV3b has been identified and is shown in Table SNP2.

TABLE SNP2
Variant of NOV3b.

| | Nucleotides | | | Amino Acids | | |
|---|---|---|---|---|---|---|
| Variant | Position | Initial | Modified | Position | Initial | Modified |
| c110.6682 | 414 | C | A | 134 | Ser | Tyr |

[0875] NOV7a SNP Data (CG134632-01)

[0876] One polymorphic variant of NOV7a has been identified and is shown in Table SNP3.

TABLE SNP3
Variant of NOV7a.

| | Nucleotides | | | Amino Acids | | |
|---|---|---|---|---|---|---|
| Variant | Position | Initial | Modified | Position | Initial | Modified |
| 13378877 | 699 | C | G | 96 | Pro | Pro |

[0877] NOV8a SNP Data (CG148411-01)

[0878] Four polymorphic variants of NOV8a have been identified and are shown in Table SNP4.

TABLE SNP4
Variants of NOV8a

| | Nucleotides | | | Amino Acids | | |
|---|---|---|---|---|---|---|
| Variant | Position | Initial | Modified | Position | Initial | Modified |
| 13381925 | 180 | G | A | 0 | | |
| 13381926 | 429 | C | T | 78 | Pro | Leu |
| 13381915 | 435 | G | A | 80 | Gly | Glu |
| 13381924 | 752 | A | G | 0 | | |

[0879] NOV19b SNP Data (CG54092-01)

[0880] Three polymorphic variants of NOV19b have been identified and are shown in Table SNP5.

TABLE SNP5
Variants of NOV19b

| | Nucleotides | | | Amino Acids | | |
|---|---|---|---|---|---|---|
| Variant | Position | Initial | Modified | Position | Initial | Modified |
| 13376993 | 284 | A | G | 95 | Glu | Gly |
| 13376994 | 958 | G | A | 320 | Ala | Thr |
| 13376995 | 968 | T | C | 323 | Leu | Pro |

[0881] NOV22c SNP Data (CG56618-04)

[0882] Eight polymorphic variants of NOV22c have been identified and are shown in Table SNP6.

TABLE SNP6
Variants of NOV22c

| | Nucleotides | | | Amino Acids | | |
|---|---|---|---|---|---|---|
| Variant | Position | Initial | Modified | Position | Initial | Modified |
| 13381966 | 158 | C | T | 22 | Ala | Val |
| 13381967 | 258 | C | T | 55 | Arg | Arg |
| 13381979 | 282 | G | A | 63 | Ser | Ser |
| 13381980 | 285 | G | A | 64 | Lys | Lys |
| 13381968 | 338 | G | A | 82 | Arg | His |
| 13381981 | 360 | A | G | 89 | Thr | Thr |
| 13381982 | 362 | G | A | 90 | Gly | Asp |
| 13381969 | 834 | A | G | 247 | Lys | Lys |

[0883] NOV24a SNP Data (CG59522-02)

[0884] Eight polymorphic variants of NOV22c have been identified and are shown in Table SNP7.

TABLE SNP7
Variants of NOV24a

| | Nucleotides | | | Amino Acids | | |
|---|---|---|---|---|---|---|
| Variant | Position | Initial | Modified | Position | Initial | Modified |
| 13377472 | 285 | T | C | 91 | Tyr | His |
| 13380146 | 375 | G | T | 121 | Ala | Ser |
| 13377473 | 553 | G | A | 180 | Arg | His |
| 13377474 | 554 | C | T | 180 | Arg | Arg |
| 13381928 | 1262 | T | C | 416 | Asn | Asn |
| 13377475 | 2596 | G | A | 861 | Arg | Gln |

### Example E

### Method of Use

### Example E1

### Method of use for CG154077-01, NOV9a (Human Sulfonylurea Receptor 2A)

[0885] The present invention discloses novel associations of proteins and polypeptides and the nucleic acids that encode them with various diseases or pathologies. The proteins and related proteins that are similar to them, are encoded by a cDNA and/or by genomic DNA. The Sulfonylurea Receptor 2A (CG154077)-encoded protein and any variants, thereof, are suitable as diagnostic markers, targets for an antibody therapeutic and targets for small molecule drugs. As such the current invention embodies the use of recombinantly expressed and/or endogenously expressed protein in various screens to identify such therapeutic antibodies and/or therapeutic small molecules, particularly for use in the treatment of obesity or diabetes.

[0886] Obesity and Diabetes are major public health concerns in the developed and developing world. It is estimated that over half of the adult US population is overweight with a body mass index (BMI) greater than the upper limit of normal (25) where the BMI is defined as the weight (Kg)/[height (m)]². A common consequence of being overweight is hyperlipidemia and the development of insulin resistance. This is followed by the development of hyperglycemia, a hallmark of Type II diabetes. Left untreated, the hyperglycemia leads to microvascular disease and end organ damage that includes retinopathy, renal disease, cardiac disease, peripheral neuropathy and peripheral vascular compromise. Currently, over 16 million adults in the US are affected by Type II diabetes and the condition has now become rampant among school-age children as a consequence of the epidemic of obesity in that age group.

[0887] Several cellular, animal and clinical studies were performed to elucidate the genetic contribution to the etiology and pathogenesis of these conditions in a variety of physiologic, pharmacologic or native states. These studies utilized the core technologies at CuraGen Corporation to look at differential gene expression, protein-protein interactions, large-scale sequencing of expressed genes and the association of genetic variations such as, but not limited to, single nucleotide polymorphisms (SNPs) or splice variants in and between biological samples from experimental and control groups. The goal of such studies is to identify potential avenues for therapeutic intervention in order to prevent, treat the consequences or cure the conditions of obesity and diabetes.

[0888] In order to treat diseases, pathologies and other abnormal states or conditions in which a mammalian organism has been diagnosed as being, or as being at risk for becoming, other than in a normal state or condition, it is important to identify new therapeutic agents. Such a procedure includes at least the steps of identifying a target component within an affected tissue or organ, and identifying a candidate therapeutic agent that modulates the functional attributes of the target. The target component may be any biological macromolecule implicated in the disease or pathology. Commonly the target is a polypeptide or protein with specific functional attributes. Other classes of macromolecule may be a nucleic acid, a polysaccharide, a lipid such as a complex lipid or a glycolipid; in addition a target may be a sub-cellular structure or extra-cellular structure that is comprised of more than one of these classes of macromolecule. Once such a target has been identified, it may be employed in a screening assay in order to identify favorable candidate therapeutic agents from among a large population of substances or compounds.

[0889] In many cases the objective of such screening assays is to identify small molecule candidates; this is commonly approached by the use of combinatorial methodologies to develop the population of substances to be tested. The implementation of high throughput screening methodologies is advantageous when working with large, combinatorial libraries of compounds.

[0890] It is an objective of this invention to provide at least one target biopolymer that is intended to serve as the macromolecular component in a screening assay for identifying candidate pharmaceutical agents.

[0891] It is another objective of the present invention to provide screening assays that positively identify candidate pharmaceutical agents from among a combinatorial library of low molecular weight substances or compounds.

[0892] It is still a further objective of this invention to employ the candidate pharmaceutical agents in any of a variety of in vitro, ex vivo and in vivo assays in order to identify pharmaceutical agents with advantageous therapeutic applications in the treatment of a disease, pathology, or abnormal state or condition in a mammal.

[0893] Sulfonylurea Receptor 2 (SUR2) is a member of the superfamily of ATP-binding cassette (ABC) transporters. It functions as a drug-binding regulatory subunit of the muscle specific ATP-sensitive potassium channel. Recent data showed that disruption of SUR2 leads to increased insulin stimulated glucose uptake in skeletal muscle. (Chutkow W A, Samuel V, Hansen P A, Pu J, Valdivia C R, Makielski J C, Burant C F. Disruption of Sur2-containing K(ATP) channels enhances insulin-stimulated glucose uptake in skeletal muscle. Proc. Natl. Acad. Sci. USA 2001. 98,11760-4. PMID: 11562480; Chutkow W A, Simon M C, Le Beau M M, Burant C F. Cloning, tissue expression, and chromosomal localization of SUR2, the putative drug-binding subunit of cardiac, skeletal muscle, and vascular KATP channels. Diabetes 1996. 45,1439-45. PMID: 8826984; Halseth A E, Bracy D P, Wasserman D H. Functional limitations to glucose uptake in muscles comprised of different fiber types. Am. J. Physiol. Endocrinol. Metab. 2001. 280, E994-9. PMID: 11350781; Shindo T, Yamada M, Isomoto S, Horio Y, Kurachi Y. SUR2 subtype (A and B)-dependent differential activation of the cloned ATP-sensitive K+ channels by pinacidil and nicorandil. Br. J. Pharmacol. 1998.124, 985-91. PMID: 9692785; Reimann F, Ashcroft F M, Gribble F M. Structural basis for the interference between nicorandil and sulfonylurea action. Diabetes 2001.50, 2253-9. PMID: 11574406; Moreau C, Jacquet H, Prost A L, D'hahan N, Vivaudou M. The molecular basis of the specificity of action of K(ATP) channel openers. EMBO J. 2000.19, 6644-51. PMID: 11118199).

[0894] The present invention is based on the identification of biological macromolecules differentially modulated in a pathologic state, disease, or an abnormal condition or state. Among the pathologies or diseases of present interest include metabolic diseases, including those related to endocrinologic disorders, cancers, various tumors and neoplasias, inflammatory disorders, central nervous system disorders, and similar abnormal conditions or states. Important metabolic disorders with which the biological macromolecules are associated include obesity and diabetes mellitus, especially obesity and Type II diabetes. It is believed that obesity predisposes a subject to Type II diabetes. In very significant embodiments of the present invention, the biological macromolecules implicated in these pathologies and conditions are proteins and polypeptides, and in such cases the present invention is related as well to the nucleic acids that encode them. Methods that may be employed to identify relevant biological macromolecules include any procedures that detect differential expression of nucleic acids encoding proteins and polypeptides associated with the disorder, as well as procedures that detect the respective proteins and polypeptides themselves. Significant methods that have been employed by the present inventors, include GeneCalling® technology and SeqCalling™ technology, disclosed respectively, in U.S. Pat. No. 5,871,697, and in U.S. Ser. No. 09/417,386, filed Oct. 13, 1999, each of which is incorporated herein by reference in its entirety. GeneCalling® is also described in Shimkets, et al., “Gene expression analysis by transcript profiling coupled to a gene database query” Nature Biotechnology 17:198-803 (1999).

[0895] The invention provides polypeptides and nucleotides encoded thereby that have been identified as having novel associations with a disease or pathology, or an abnormal state or condition, in a mammal. Included in the invention are nucleic acid sequences and their encoded polypeptides. The sequences are collectively referred to as “obesity and/or diabetes nucleic acids” or “obesity and/or diabetes polynucleotides” and the corresponding encoded polypeptide is referred to as an “obesity and/or diabetes polypeptide” or “obesity and/or diabetes protein”. For example, an obesity and/or diabetes nucleic acid according to the invention is a nucleic acid including an obesity and/or diabetes nucleic acid, and an obesity and/or diabetes polypeptide according to the invention is a polypeptide that includes the amino acid sequence of an obesity and/or diabetes polypeptide. Unless indicated otherwise, “obesity and/or diabetes” is meant to refer to any of the sequences having novel associations disclosed herein.

[0896] The present invention identifies a set of proteins and polypeptides, including naturally occurring polypeptides, precursor forms or proproteins, or mature forms of the polypeptides or proteins, which are implicated as targets for therapeutic agents in the treatment of various diseases, pathologies, abnormal states and conditions. A target may be employed in any of a variety of screening methodologies in order to identify candidate therapeutic agents which interact with the target and in so doing exert a desired or favorable effect. The candidate therapeutic agent is identified by screening a large collection of substances or compounds in an important embodiment of the invention. Such a collection may comprise a combinatorial library of substances or compounds in which, in at least one subset of substances or compounds, the individual members are related to each other by simple structural variations based on a particular canonical or basic chemical structure. The variations may include, by way of nonlimiting example, changes in length or identity of a basic framework of bonded atoms; changes in number, composition and disposition of ringed structures, bridge structures, alicyclic rings, and aromatic rings; and changes in pendent or substituents atoms or groups that are bonded at particular positions to the basic framework of bonded atoms or to the ringed structures, the bridge structures, the alicyclic structures, or the aromatic structures.

[0897] A polypeptide or protein described herein, and that serves as a target in the screening procedure, includes the product of a naturally occurring polypeptide or precursor form or proprotein. The naturally occurring polypeptide, precursor or proprotein includes, e.g., the full-length gene product, encoded by the corresponding gene. The naturally occurring polypeptide also includes the polypeptide, precursor or proprotein encoded by an open reading frame described herein. A “mature” form of a polypeptide or protein arises as a result of one or more naturally occurring processing steps as they may occur within the cell, including a host cell. The processing steps occur as the gene product arises, e.g., via cleavage of the amino-terminal methionine residue encoded by the initiation codon of an open reading frame, or the proteolytic cleavage of a signal peptide or leader sequence. Thus, a mature form arising from a precursor polypeptide or protein that has residues 1 to N, where residue 1 is the N-terminal methionine, would have residues 2 through N remaining. Alternatively, a mature form arising from a precursor polypeptide or protein having residues 1 to N, in which an amino-terminal signal sequence from residue 1 to residue M is cleaved, includes the residues from residue M+1 to residue N remaining. A “mature” form of a polypeptide or protein may also arise from non-proteolytic post-translational modification. Such non-proteolytic processes include, e.g., glycosylation, myristylation or phosphorylation. In general, a mature polypeptide or protein may result from the operation of only one of these processes, or the combination of any of them.

[0898] Sulfonylurea receptor 2 (SUR2, CG154077-01) was found to be up-regulated in fast twitch versus slow twitch skeletal muscle in mice on a high fat diet and in hyperglycemic/diabetic mice. It is known that glucose uptake is reduced in fast twitch muscle as compared to slow twitch muscle. Inhibition of SUR2 would favor the slow twitch muscle phenotype, thus increasing glucose uptake and improving insulin sensitivity.

[0899] As used herein, “identical” residues correspond to those residues in a comparison between two sequences where the equivalent nucleotide base or amino acid residue in an alignment of two sequences is the same residue. Residues are alternatively described as “similar” or “positive” when the comparisons between two sequences in an alignment show that residues in an equivalent position in a comparison are either the same amino acid or a conserved amino acid as defined below.

[0900] As used herein, a “chemical composition” relates to a composition including at least one compound that is either synthesized or extracted from a natural source. A chemical compound may be the product of a defined synthetic procedure. Such a synthesized compound is understood herein to have defined properties in terms of molecular formula, molecular structure relating the association of bonded atoms to each other, physical properties such as electropherographic or spectroscopic characterizations, and the like. A compound extracted from a natural source is advantageously analyzed by chemical and physical methods in order to provide a representation of its defined properties, including its molecular formula, molecular structure relating the association of bonded atoms to each other, physical properties such as electropherographic or spectroscopic characterizations, and the like.

[0901] As used herein, a “candidate therapeutic agent” is a chemical compound that includes at least one substance shown to bind to a target biopolymer. In important embodiments of the invention, the target biopolymer is a protein or polypeptide, a nucleic acid, a polysaccharide or proteoglycan, or a lipid such as a complex lipid. The method of identifying compounds that bind to the target effectively eliminates compounds with little or no binding affinity, thereby increasing the potential that the identified chemical compound may have beneficial therapeutic applications. In cases where the “candidate therapeutic agent” is a mixture of more than one chemical compound, subsequent screening procedures may be carried out to identify the particular substance in the mixture that is the binding compound, and that is to be identified as a candidate therapeutic agent.

[0902] As used herein, a “pharmaceutical agent” is provided by screening a candidate therapeutic agent using models for a disease state or pathology in order to identify a candidate exerting a desired or beneficial therapeutic effect with relation to the disease or pathology. Such a candidate that successfully provides such an effect is termed a pharmaceutical agent herein. Nonlimiting examples of model systems that may be used in such screens include particular cell lines, cultured cells, tissue preparations, whole tissues, organ preparations, intact organs, and nonhuman mammals. Screens employing at least one system, and preferably more than one system, may be employed in order to identify a pharmaceutical agent. Any pharmaceutical agent so identified may be pursued in further investigation using human subjects.

[0903] Use of the human Sulfonylurea Receptor 2A Gene as a Diagnostic and/or Target for Small Molecule Drugs and Antibody Therapeutics.

[0904] The analysis of CG154077-01 by the following algorithms shows the gene product is a plasma membrane associated ABC transporter with characteristic functional protein domains.

[0905] Functional Homology: Query: CG154077-01

[0906] ptnr:SWISSPROT-ACC:060706 Sulfonylurea receptor 2-Homo sapiens (Human), 1549

[0907] aa.

[0908] Length=1549

[0909] Score=7961 (2802.4 bits), Expect=0.0, P=0.0

[0910] Identities=1549/1549 (100%), Positives =1549/1549 (100*)

[0911] The Protein Translation of CG154077-01 was Shown by BLAST Analysis to be Identical to the Sulfonylurea Receptor 2 Sequence 060706 in the SwissProt Database.

[0912] PSORT result: Query: CG154077-01

[0913] plasma membrane—Certainty=0.8000(Affirmative)<succ>

[0914] Golgi body—Certainty=0.4000(Affirmative)<succ>

[0915] endoplasmic reticulum (membrane)—Certainty=0.3000(Affirmative)<succ>

[0916] microbody (peroxisome)—Certainty=0.3000(Affirmative)<succ>

[0917] PSORT analysis predicts that CG154077-01 is localized at the plasma membrane.

[0918] Mouse Dietary—Induced Obesity Study (BP24.02)

[0919] The predominant cause for obesity in clinical populations is excess caloric intake. This so-called diet-induced obesity (DIO) is mimicked in animal models by feeding high fat diets of greater than 40% fat content. The DIO study was established to identify the gene expression changes contributing to the development and progression of diet-induced obesity. In addition, the study design seeks to identify the factors that lead to the ability of certain individuals to resist the effects of a high fat diet and thereby prevent obesity. The sample groups for the study were selected from C57BL/6J mice and had body weights +1 S.D. (sd1), +4 S.D. (sd4) and +7 S.D. of the chow-fed controls (below). In addition, the biochemical profile of the +7 S.D. mice revealed a further stratification of these animals into mice that retained a normal glycemic profile in spite of obesity (ngsd7) and mice that demonstrated hyperglycemia (hgsd7). Tissues examined included hypothalamus, brainstem, liver, retroperitoneal white adipose tissue (WAT), epididymal WAT, brown adipose tissue (BAT), gastrocnemius muscle (fast twitch skeletal muscle) and soleus muscle (slow twitch skeletal muscle). The differential gene expression profiles for these tissues should reveal genes and pathways that can be used as therapeutic targets for obesity.

[0920] Results of GeneCalling Study BP24.02

[0921] A gene fragment of the mouse Sulfonylurea Receptor 2A was found to be up-regulated by 2 fold in the gastrocnemius versus soleus skeletal muscle in mouse on high fat diet (sd1) using CuraGen's GeneCalling™ method of differential gene expression. It was also found to be up-regulated by 3 fold in the gastrocnemius versus soleus skeletal muscle in obese mouse with hyperglycemia (hgsd7). A differentially expressed mouse gene fragment migrating, at approximately 97 nucleotides in length (Table E1.-solid vertical line) was definitively identified as a component of the mouse Sulfonylurea Receptor 2A cDNA (in the graphs, the abscissa is measured in lengths of nucleotides and the ordinate is measured as signal response). The method of comparative PCR was used for conformation of the gene assessment. The electropherographic peaks corresponding to the gene fragment of the mouse Sulfonylurea Receptor 2A are ablated when a gene-specific primer (see below) competes with primers in the linker-adaptors during the PCR amplification. The peaks at 97 nt in length are ablated (dotted or dashed trace) in the sample from both the gestational diabetic and normal pregnant female.

[0922] The direct sequence of the 97 nucleotide-long gene fragment and the gene-specific primers used for competitive PCR are indicated on the cDNA sequence of the Sulfonylurea Receptor 2A and are shown below in bold. The gene-specific primers at the 5′ and 3′ ends of the fragment are in italics.

[0923] Competitive PCR Primer for the Mouse Sulfonylurea Receptor 2A (fragment from 3054 to 3150 of the above listed sequence SEQ ID NO: 37 for NOV9a, CG154077-01, band size: 97) is shown in Table E1.

[image]

[0924] A Pfam analysis of CG154077 identifies 4 significant domains in this protein.

[0925] Pfam domains:Query: CG154077-01

[0926] Scores for sequence family classification (score includes all domains):

| Model | | | |
|---|---|---|---|
| E-value | N | Description | Score |
| ABC_tran | 2 | ABC transporter | 292.5 |
| 5.2e−84 | | | |
| ABC_membrane | 2 | ABC transporter transmembrane | 250.5 |
| 2.3e−71 | | region. | |
| DUF55 | 1 | Protein of unknown function DUF55 | −45.2 |
| 8.9 | | | |
| Folate_carrier | 1 | Reduced folate carrier | −215.2 |
| 7.9 | | | |

[0927] Parsed for domains:

| Model | Domain | seq-f | seq-t | hmm-f | hmm-t | score | E-value |
|---|---|---|---|---|---|---|---|
| ABC_membrane | 1/2 | 297 | 585 . . . | 1 | 285 [ ] | 122.5 | 7.8e−33 |
| ABC_tran | 1/2 | 698 | 888 . . . | 1 | 198 [ ] | 159.8 | 4.7e−44 |
| ABC_membrane | 2/2 | 994 | 1266 . . . | 1 | 285 [ ] | 136.3 | 5.6e−37 |
| Folate_carrier | 1/1 | 935 | 1282 . . . | 1 | 416 [ ] | −215.2 | 7.9 |
| DUF55 | 1/1 | 1304 | 1422 . . . | 1 | 140 [ ] | −45.2 | 8.9 |
| ABC_tran | 2/2 | 1339 | 1522 . . . | 1 | 198 [ ] | 132.9 | 5.9e−36 |

[0928] The E values for ABC transporter domains from the Pfam analysis of CG154077-01 are highly significant and indicate that it is an active ABC membrane transporter.

[0929] The analysis of CG154077-01 by the following algorithms shows the gene product is a plasma membrane associated ABC transporter with characteristic functional protein domains.

[0930] SeqCalling

[0931] Library:

| Assembly | Tissue Expression |
|---|---|
| 129286786 | Mammalian Tissue, Vein, Mammary gland/Breast, |
| | Oviduct/Uterine Tube/Fallopian tube, Kidney |
| 189213126 | Mammalian Tissue, Heart, Vein, Brain, Mammary |
| | gland/Breast, Oviduct/Uterine |
| | Tube/Fallopian tube, Lung, Kidney, Skin |
| 219115181 | Mammalian Tissue, Heart, Vein, Lung, Kidney, Skin |

[0932] SeqCalling shows the expression of CG154077-01 in heart, brain, and several unrelated tissues.

[0933] The variants of the human Sulfonylurea Receptor 2A were obtained from direct cloning and/or public databases. In addition to the human version of the gene identified as being differentially expressed in the experimental study, other variants have been identified by direct sequencing of cDNAs derived from many different human tissues and from sequences in public databases.

[0934] There are at least three alternative spliced isoforms identified in human (SUR2A, SUR2Adelta, SUR2B). SUR2A delta is identical to SUR2A (CG154077-01), but lacks exon 14. SUR2B has a unique C-terminus from SUR2A originated from different exon usage (SUR2A use exon 39, SUR2B-exon 40).

[0935] RTQPCR Analysis

[0936] Panel 1.5 shows CG154077 is expressed in a number of metabolic tissues including adipose, kidney, heart, and pancreas, the highest level of expression of SUR2 in skeletal muscle.

[0937] Panel 5I shows CG154077 is expressed in human adipose and skeletal muscle. The expression level of CG154077 is significantly elevated in diabetic adipose/skeletal muscle (patient 12) compared to non-diabetic individuals. These data further support that up-regulation of human Sulfonylurea receptor A2 has pathogenic consequences, and inhibition of this gene or the activity of the protein encoded by this gene is beneficial for the treatment of diabetes.

[0938] Biochemistry, Cell Line Expression and Screening Assay Formulation

[0939] Sulfonylurea Receptor 2A (SUR2) is a regulatory subunit of potassium channel. Usual way to assay the activity of the channel is to measure the current by path-clamp method in transfected mammalian cell line or in Xenopus Oocytes expressed recombinant protein. There are known activators, for example clinical vaso-relaxant agent (penacidil). It has been shown that sulfoneurea compound is able to inhibit SUR2, but from 100 to 1000 less effective than For SUR1.

[0940] Cell lines expressing the Sulfonylurea Receptor 2A can be obtained from the RTQ-PCR results shown above. These and other Sulfonylurea Receptor 2A expressing cell lines could be used for screening purposes.

[0941] While not to be limited by theory, the inventor proposes that disruption of Sulfonylurea Receptor 2 contaning potassium channels enhances insulin-stimulated glucose uptake in skeletal muscle and that Sulfonylurea Receptor 2 is up-regulated in fast twitch muscle versus slow twitch in the animal model on a high fat diet and in the animal model with hyperglycemia. It is known that glucose uptake is reduced in fast twitch muscle compared to slow twitch. Therefore inhibition of Sulfonylurea Receptor 2 would increase insulin stimulate glucose uptake and favor slow twitch muscle phenotype, thus improving insulin sensitivity. An inhibitor/antagonist of the human Sulfonylurea Receptor 2A would be beneficial in the treatment of diabetes.

### Example E2

### Human Protein Kinase MEK2-like Proteins, Nucleic Acids Encoding the Same & Methods of Use Thereof

[0942] In order to treat diseases, pathologies and other abnormal states or conditions in which a mammalian organism has been diagnosed as being, or as being at risk for becoming, other than in a normal state or condition, it is important to identify new therapeutic agents.

[0943] MEK2 is a dual specificity protein kinase involved in MAPK/ERK signaling cascade (Lewis T S, Shapiro P S, Ahn N G., 1998, Signal transduction through MAP kinase cascades. Adv Cancer Res;74:49-139; PMID: 9561267). The cascade is activated by a wide variety of receptors involved in growth and differentiation including receptor tyrosine kinases, integrins, and ion channels. The specific components of the cascade vary greatly among different stimuli, but the architecture of the pathway usually includes a set of adaptors linking the receptor to a guanine nucleotide exchange factor transducing the signal to small GTP binding proteins (Ras, Rap 1), which in turn activate the core unit of the cascade composed of a MAPKKK (Raf), a MAPKK (MEK1/2) and MAPK (ERK). An activated ERK dimer can regulate targets in the cytosol and also translocate to the nucleus where it phosphorylates a variety of transcription factors regulating gene expression.

[0944] MEK1 and MEK2 belong to the MAP kinase kinase family and directly contribute to ERK activation that acts as an integration point for multiple biochemical signals, and are involved in a wide variety of cellular processes such as proliferation, differentiation, transcription regulation and development. It is known that both MEKs are activated in response to TNF alpha treatment (Jain R G, Phelps K D, Pekala P H.,1999) Tumor necrosis factor-alpha initiates signal transduction in 3T3-L1 adipocytes (J Cell Physiol. 179: 58-66; PMID: 10082133; Zhang H H, Halbleib M, Ahmad F, Manganiello V C, Greenberg A S). Tumor necrosis factor-alpha stimulates lipolysis in differentiated human adipocytes through activation of extracellular signal-related kinase and elevation of intracellular cAMP (Diabetes 51(10): 2929-35; 2002; PMID: 12351429). Recently it has been shown that treating adipocytes with an antagonist of both MEKs restores insulin sensitivity (Engelman J A, Berg A H, Lewis R Y, Lisanti M P, Scherer P E. (2000) Tumor necrosis factor alpha-mediated insulin resistance, but not dedifferentiation, is abrogated by MEK1/2 inhibitors in 3T3-LI adipocytes. Mol. Endocrinology 14, 1557; PMID: 11043572).

[0945] Several cellular, animal and clinical studies were performed to elucidate the genetic contribution to the etiology and pathogenesis of these conditions in a variety of physiologic, pharmacologic or native states. These studies utilized the core technologies at CuraGen Corporation to look at differential gene expression, protein-protein interactions, large-scale sequencing of expressed genes and the association of genetic variations such as, but not limited to, single nucleotide polymorphisms (SNPs) or splice variants in and between biological samples from experimental and control groups. The goal of such studies is to identify potential avenues for therapeutic intervention in order to prevent, treat the consequences or cure the conditions of obesity and diabetes.

[0946] The present invention discloses novel associations of proteins and polypeptides and the nucleic acids that encode them with various diseases or pathologies. The proteins and related proteins that are similar to them, are encoded by a cDNA and/or by genomic DNA. The proteins, polypeptides and their cognate nucleic acids were identified by the inventor in certain cases. In particular, the Protein Kinase MEK2 protein encoded by CG55838-02 and any variants, thereof, are suitable as diagnostic markers, targets for an antibody therapeutic and targets for small molecule drugs. The inventor has discovered that expression of Protein Kinase MEK2 is down-regulated in skeletal muscle in mice resistant to diet-induced obesity indicating that specific inhibition of MEK2 will favor the lean phenotype. The inventor also found that Protein Kinase MEK2 is dysregulated in genetically obese mice. The inventor has further disclosed that Protein Kinase MEK2 is elevated in liver in obese patients. Taken together, these findings indicate that MEK2 is a positive marker for obesity in insulin-responsive tissues. The inventor proposes that MEK2 is a mediator of insulin resistance associated with obesity and therefore, an antagonist of MEK2 should be beneficial for the treatment of diabetes and/or obesity. A preferred method of the invention is the use of the Protein Kinase MEK2 for identifying an agonist that would be beneficial in the treatment of obesity and/or diabetes. As such, the current invention embodies the use of recombinantly expressed and/or endogenously expressed protein in various screens to identify such therapeutic antibodies and/or therapeutic small molecules.

[0947] The present invention is based on the identification of biological macromolecules differentially modulated in a pathologic state, disease, or an abnormal condition or state. Among the pathologies or diseases of present interest include metabolic diseases, including those related to endocrinologic disorders, cancers, various tumors and neoplasias, inflammatory disorders, central nervous system disorders, and similar abnormal conditions or states. Important metabolic disorders with which the biological macromolecules are associated include obesity and diabetes mellitus, especially obesity and Type II diabetes. It is believed that obesity predisposes a subject to Type II diabetes. In very significant embodiments of the present invention, the biological macromolecules implicated in these pathologies and conditions are proteins and polypeptides, and in such cases the present invention is related as well to the nucleic acids that encode them. Methods that may be employed to identify relevant biological macromolecules include any procedures that detect differential expression of nucleic acids encoding proteins and polypeptides associated with the disorder, as well as procedures that detect the respective proteins and polypeptides themselves. Significant methods that have been employed by the present inventors, include GeneCalling 0 technology and SeqCalling™ technology, disclosed respectively, in U.S. Pat. No. 5,871,697, and in U.S. Ser. No. 09/417,386, filed Oct. 13, 1999, each of which is incorporated herein by reference in its entirety. GeneCalling C is also described in Shimkets, et al., “Gene expression analysis by transcript profiling coupled to a gene database query” Nature Biotechnology 17:198-803 (1999).

[0948] The invention provides polypeptides and nucleotides encoded thereby that have been identified as having novel associations with a disease or pathology, or an abnormal state or condition, in a mammal. Included in the invention are nucleic acid sequences and their encoded polypeptides. The sequences are collectively referred to as “obesity and/or diabetes nucleic acids” or “obesity and/or diabetes polynucleotides” and the corresponding encoded polypeptide is referred to as an “obesity and/or diabetes polypeptide” or “obesity and/or diabetes protein”. For example, an obesity and/or diabetes nucleic acid according to the invention is a nucleic acid including an obesity and/or diabetes nucleic acid, and an obesity and/or diabetes polypeptide according to the invention is a polypeptide that includes the amino acid sequence of an obesity and/or diabetes polypeptide. Unless indicated otherwise, “obesity and/or diabetes” is meant to refer to any of the sequences having novel associations disclosed herein.

[0949] The present invention identifies a set of proteins and polypeptides, including naturally occurring polypeptides, precursor forms or proproteins, or mature forms of the polypeptides or proteins, which are implicated as targets for therapeutic agents in the treatment of various diseases, pathologies, abnormal states and conditions. A target may be employed in any of a variety of screening methodologies in order to identify candidate therapeutic agents which interact with the target and in so doing exert a desired or favorable effect. The candidate therapeutic agent is identified by screening a large collection of substances or compounds in an important embodiment of the invention. Such a collection may comprise a combinatorial library of substances or compounds in which, in at least one subset of substances or compounds, the individual members are related to each other by simple structural variations based on a particular canonical or basic chemical structure. The variations may include, by way of nonlimiting example, changes in length or identity of a basic framework of bonded atoms; changes in number, composition and disposition of ringed structures, bridge structures, alicyclic rings, and aromatic rings; and changes in pendent or substituents atoms or groups that are bonded at particular positions to the basic framework of bonded atoms or to the ringed structures, the bridge structures, the alicyclic structures, or the aromatic structures.

[0950] A polypeptide or protein described herein, and that serves as a target in the screening procedure, includes the product of a naturally occurring polypeptide or precursor form or proprotein. The naturally occurring polypeptide, precursor or proprotein includes, e.g., the full-length gene product, encoded by the corresponding gene. The naturally occurring polypeptide also includes the polypeptide, precursor or proprotein encoded by an open reading frame described herein. A “mature” form of a polypeptide or protein arises as a result of one or more naturally occurring processing steps as they may occur within the cell, including a host cell. The processing steps occur as the gene product arises, e.g., via cleavage of the amino-terminal methionine residue encoded by the initiation codon of an open reading frame, or the proteolytic cleavage of a signal peptide or leader sequence. Thus, a mature form arising from a precursor polypeptide or protein that has residues 1 to N, where residue 1 is the N-terminal methionine, would have residues 2 through N remaining. Alternatively, a mature form arising from a precursor polypeptide or protein having residues 1 to N, in which an amino-terminal signal sequence from residue 1 to residue M is cleaved, includes the residues from residue M+1 to residue N remaining. A “mature” form of a polypeptide or protein may also arise from non-proteolytic post-translational modification. Such non-proteolytic processes include, e.g., glycosylation, myristylation or phosphorylation. In general, a mature polypeptide or protein may result from the operation of only one of these processes, or the combination of any of them.

[0951] As used herein, “identical” residues correspond to those residues in a comparison between two sequences where the equivalent nucleotide base or amino acid residue in an alignment of two sequences is the same residue. Residues are alternatively described as “similar” or “positive” when the comparisons between two sequences in an alignment show that residues in an equivalent position in a comparison are either the same amino acid or a conserved amino acid as defined below.

[0952] As used herein, a “chemical composition” relates to a composition including at least one compound that is either synthesized or extracted from a natural source. A chemical compound may be the product of a defined synthetic procedure. Such a synthesized compound is understood herein to have defined properties in terms of molecular formula, molecular structure relating the association of bonded atoms to each other, physical properties such as electropherographic or spectroscopic characterizations, and the like. A compound extracted from a natural source is advantageously analyzed by chemical and physical methods in order to provide a representation of its defined properties, including its molecular formula, molecular structure relating the association of bonded atoms to each other, physical properties such as electropherographic or spectroscopic characterizations, and the like.

[0953] As used herein, a “candidate therapeutic agent” is a chemical compound that includes at least one substance shown to bind to a target biopolymer. In important embodiments of the invention, the target biopolymer is a protein or polypeptide, a nucleic acid, a polysaccharide or proteoglycan, or a lipid such as a complex lipid. The method of identifying compounds that bind to the target effectively eliminates compounds with little or no binding affinity, thereby increasing the potential that the identified chemical compound may have beneficial therapeutic applications. In cases where the “candidate therapeutic agent” is a mixture of more than one chemical compound, subsequent screening procedures may be carried out to identify the particular substance in the mixture that is the binding compound, and that is to be identified as a candidate therapeutic agent.

[0954] As used herein, a “pharmaceutical agent” is provided by screening a candidate therapeutic agent using models for a disease state or pathology in order to identify a candidate exerting a desired or beneficial therapeutic effect with relation to the disease or pathology. Such a candidate that successfully provides such an effect is termed a pharmaceutical agent herein. Nonlimiting examples of model systems that may be used in such screens include particular cell lines, cultured cells, tissue preparations, whole tissues, organ preparations, intact organs, and nonhuman mammals. Screens employing at least one system, and preferably more than one system, may be employed in order to identify a pharmaceutical agent. Any pharmaceutical agent so identified may be pursued in further investigation using human subjects.

[0955] In particular the invention relates to the use of Protein Kinase MEK2 protein as a diagnostic and/or target for small molecule drugs and antibody therapeutics.

[0956] The inventor has discovered that Protein Kinase MEK2 is down-regulated in skeletal muscle in mice resistant to diet-induced obesity indicating that inhibition of MEK2 will favor the lean phenotype. The inventor also found that Protein Kinase MEK2 is dysregulated in genetically obese mice. The inventor has further disclosed that Protein Kinase MEK2 is elevated in liver in obese patients. Taken together, these findings show that MEK2 is a positive marker for obesity in insulin-responsive tissues. The inventor shows that MEK2 is the most abundant isoform expressed in skeletal muscle and liver, two major insulin sensitive tissues. Not to be limited by a particular mechanism of action, the inventor nevertheless proposes that MEK2 is a mediator of insulin resistance and/or diabetes associated with obesity. In a particular embodiment of the invention, Protein Kinase MEK2 is a target for screening. As such, the current invention embodies the use of recombinantly expressed and/or endogenously expressed protein in various screens to identify Protein Kinase MEK2 antagonist, therapeutic antibodies and/or therapeutic small molecules beneficial in the treatment of obesity and/or diabetes.

[0957] Results from GeneCallin® Experiments

[0958] Materials and Methods

[0959] The following sections describe the study design(s) used to identify the PROTEIN KINASE MEK2-encoded protein and any variants, thereof, as being suitable as diagnostic markers, targets for an antibody therapeutic and targets for a small molecule drugs for Obesity and Diabetes.

[0960] Mouse Dietary—Induced Obesity Study (BP24.02)

[0961] The predominant cause for obesity in clinical populations is excess caloric intake. This so-called diet-induced obesity (DIO) is mimicked in animal models by feeding high fat diets of greater than 40% fat content. The mouse DIO study was established to identify the gene expression changes contributing to the development and progression of diet-induced obesity. In addition, the study design seeks to identify the factors that lead to the ability of certain individuals to resist the effects of a high fat diet and thereby prevent obesity. The sample groups for the study were selected from C57BL/6J mice and had body weights +1 S.D. (sd1), +4 S.D. (sd4) and +7 S.D. of the chow-fed controls (below). In addition, the biochemical profile of the +7 S.D. mice revealed a further stratification of these animals into mice that retained a normal glycemic profile in spite of obesity (ngsd7) and mice that demonstrated hyperglycemia (hgsd7). Tissues examined included hypothalamus, brainstem, liver, retroperitoneal white adipose tissue (WAT), epididymal WAT, brown adipose tissue (BAT), gastrocnemius muscle (fast twitch skeletal muscle) and soleus muscle (slow twitch skeletal muscle). Differential gene expression profiles for these tissues should reveal genes and pathways that can be used as therapeutic targets for obesity.

[0962] Mouse Obesity Study (MB.04)

[0963] A large number of mouse strains have been identified that differ in body mass and composition. The AKR and NZB strains are obese, the SWR, C57L and C57BL/6 strains are of average weight whereas the SM/J and Cast/Ei strains are lean. Understanding the gene expression differences in the major metabolic tissues from these strains will elucidate the pathophysiologic basis for obesity. These specific strains of rat were chosen for differential gene expression analysis because quantitative trait loci (QTL) for body weight and related traits had been reported in published genetic studies. Tissues included whole brain, skeletal muscle, visceral adipose, and liver.

[0964] Results of Mouse Dietary—Induced Obesity Study (BP24.02)

[0965] A fragment of the mouse Protein Kinase MEK2 gene (fragment from 249 to 301; band size: 53 nt) was initially found to be down-regulated by 1.6 fold in the gastrocnemius (glycolytic) skeletal muscle relative to soleus (oxidative) skeletal muscle of diet induced obesity-resistant (sd1) mice using CuraGen's GeneCalling™ method of differential gene expression. A differentially expressed mouse gene fragment migrating at approximately 51.7 nucleotides in length (Table E2-solid vertical line) was definitively identified as a component of the mouse Protein Kinase MEK2 cDNA (in the graphs, the abscissa is measured in lengths of nucleotides and the ordinate is measured as signal response). The method of competitive PCR using a gene-specific primer was used for confirmation of the gene assessment. The electrophoretic peak corresponding to the gene fragment of the mouse Protein Kinase MEK2 is ablated when a nested, gene-specific primer (see Table E2) competes with the primer sequences in the linker-adaptors of the dyrsegulated gene fragment during the PCR amplification. The peak at 51.7 nt in length is ablated (dotted or dashed trace) in the sample from soleus (oxidative) skeletal muscle of obesity-resistant (sd1) mice (see Table E2) In conclusion, MEK2 down-regulation observed in sd1 mice suggest that inhibition of Protein Kinase MEK2 would promote favorable obesity-resistant condition and supports the hypothesis that an antagonist of MEK2 would be beneficial for the treatment of obesity and/or diabetes.

[image]

[0966] Results of Mouse Obesity Study (MB.04)

[0967] A fragment of the mouse Protein Kinase MEK2 gene (fragment from 1169 to 1304; band size 136 nt) was initially found to be down-regulated by 1.7 fold in the skeletal muscle of normal C57L/J mice relative to genetically lean Cast/Ei mice using CuraGen's GeneCalling™ method of differential gene expression. The same fragment was up-regulated by 2.6 fold in skeletal muscle of normal SWR1 mice compared genetically lean Cast/Ei mice. A differentially expressed mouse gene fragment migrating, at approximately 137 nucleotides in length (Table E3. solid vertical line) was definitively identified as a component of the mouse Protein Kinase MEK2 cDNA (in the graphs, the abscissa is measured in lengths of nucleotides and the ordinate is measured as signal response). The method of competitive PCR was used for confirmation of the gene assessment. The electrophoretic peak corresponding to the gene fragment of the mouse Protein Kinase MEK2 is ablated when a gene-specific primer (see Table E3) competes with primers in the linker-adaptors during the PCR amplification. The peak at 136 nt in length is ablated (dotted or dashed trace) in the sample from the Cast/Ei mice (see Table E3). The finding that MEK2 is dysregulated in the animals with different weights is suggestive of the role of MEK2 in disease condition associated with obesity.

[image]

[0968] Human CG55838-02 Sequence Identification

[0969] Materials and Methods

[0970] SeqCalling fragments were identified by the CuraTools™ program, SeqExtend or by identifying SeqCalling fragments mapping to the appropriate regions of the genomic clones analyzed. Such sequences were included in the derivation of Acc. No. CG55838-02 only when the extent of identity in the overlap region with one or more SeqCalling assemblies was high. The extent of identity may be, for example, about 90% or higher, preferably about 95% or higher, and even more preferably close to or equal to 100%. When necessary, the process to identify and analyze SeqCalling fragments and genomic clones was reiterated to derive the full-length sequence. The regions defined by the procedures described above were then manually integrated and corrected for apparent inconsistencies that may have arisen, for example, from miscalled bases in the original fragments or from discrepancies between predicted exon junctions, EST locations and regions of sequence similarity, to derive the final sequence disclosed herein. When necessary, the process to identify and analyze SeqCalling assemblies and genomic clones was reiterated to derive the full-length sequence. Public proteins used for in-silico prediction were thus included in the invention: The full length sequence of the protein of invention CG55838-02 was predicted using Curatools™ program, GeneAngler.

[0971] A Pfam analysis of CG55838-02 identifies a protein kinase domain in this protein. The E values corresponding to this domain (4e-72) is highly significant and indicates that the protein encoded by this gene has a catalytically active domain characteristic of members of the Protein Kinase MEK2 protein family. The human Protein Kinase MEK2 is 400 amino acids in length, maps to human chromosome 7q32, and is located in the cytoplasm.

[0972] Human Protein Kinase MEK2Gene Variants and SNPs

[0973] One splice-form variant has been identified. This novel isoform contains a deletion in the kinase domain and preserves the ATP and phosphorylation sites. Several amino acid-changing and non-amino acid-changing cSNPs were identified at CuraGen and are shown in Table E1 below, where UCP=uncharged polar, NP=non polar, A=acidic, and B=basic. Those cSNPs with ID “cgsp” refer to CuraGen proprietary SNPs, whereas those labeled “hsnp” are from public databases. The preferred variant of all those identified, to be used for screening purposes, is CG55838-02.

TABLE E4
CG55838-02 SNPs

| | | | SNP | | | | |
|---|---|---|---|---|---|---|---|
| | SNP | | MATCH | | | | |
| | MATCH | | POSITION | | | AA | |
| | POSITION | | ON | ORIG | NEW | CHANGE | |
| SNP ID | ON DNA | ALLELES | PROTEIN | AA | AA | TYPE | STRAND |
| cgsp:13375615 | 471 | G/A | 151 | Asp | Asp | Silent | − |
| cgsp:cg34b.118 | 548 | A/C | 177 | Val | Gly | NP to | − |
| | | | | | | UCP | |
| cgsp:13379307 | 678 | C/A | 220 | Ile | Ile | Silent | + |

[0974] Expression Profile of the Human Protein Kinase MEK2Gene (CG55838-02) (Described Above in the RTQPCR Section for CG55838-02).

[0975] Gene Expression Analysis Using CuraChip

[0976] CuraGen has developed a gene microarray (CuraChip 1.2) for the identification of biologically important markes or disease or pathologicstates and targets for therapeutic intervention. It provides a high-throughput means of global mRNA expression analyses of CuraGen's collection of cDNA sequences representing the Pharmaceutically Tractable Genome (PTG). This sequence set includes genes which can be developed into protein therapeutics, or used to develop antibody or small molecule therapeutics. CuraChip 1.2 contains almost 11,000 oligos representing approximately 8,500 gene loci, including (but not restricted to) kinases, ion channels, G-protein coupled receptors (GPCRs), nuclear hormone receptors, proteases, transporters, metabolic enzymes, hormones, growth factors, chemokines, cytokines, complement and coagulation factors, and cell surface receptors.

[0977] The CuraChip cDNAs were represented as 30-mer oligodeoxyribonucleotides (oligos) on a glass microchip. Hybridization methods using the longer CuraChip oligos are more specific compared to methods using 25-mer oligos. CuraChip oligos were synthesized with a linker, purified to remove truncated oligos (which can influence hybridization strength and specificity), and spotted on a glass slide. Oligo-dT primers were used to generate cRNA probes for hybridization from samples of interest. A biotin-avidin conjugation system was used to detect hybridized probes with a fluorophore-labeled secondary antibody. Gene expression was analyzed using clustering and correlation bioinformatics tools such as Spotfire® (Spotfire, Inc., 212 Elm Street, Somerville, Mass. 02144) and statistical tools such as multivariate analysis (MVA).

[0978] Analysis of Differential Gene Expression in Diabetes and Obesity Using CuraChip Analysis.

[0979] Gene expression profiles were generated from autopsy tissues collected for RNA extraction from 12 healthy and 12 diabetic male patients belonging to each of four ethnic groups, under the age 62, that spanned body-mass indexes (BMI) representing normal (20-25), overweight (25-30) and obese (>30) phenotypes.

[0980] The metabolic tissues included psoas (skeletal muscle) and diaphragm (skeletal muscle), visceral adipose, subcutaneous adipose, small intestine, liver, pancreas and hypothalamus. Patient descriptions are as shown in Table E2:

TABLE E5

| | | | | | | | A1C |
|---|---|---|---|---|---|---|---|
| | | | | | | | last |
| Patient | | | | | | | lab. |
| ID | AGE | BMI | SEX | DX | Ethnicity | Meds | Draw |
| 42-1 | 51 | 28 | M | Diabetic | Cau | insulin | 7.7 |
| 42-13 | 60 | 22 | M | Diabetic | Cau | Micronase | 7.6 |
| 42-17 | 61 | 23 | M | Diabetic | African | Insulin, | 7.8 |
| | | | | | Am | Glucophage | |
| 42-2 | 52 | 29 | M | Diabetic | Cau | insulin, | 8.3 |
| | | | | | | Micronase | |
| 42-20 | 50 | 23 | M | Diabetic | Asian | insulin | 7.7 |
| 42-21 | 59 | 33 | M | Diabetic | Hispanic | insulin | 8.4 |
| 42-22 | 52 | 21 | M | Diabetic | Hispanic | insulin | 3.1 |
| 42-23 | 54 | 29 | M | Diabetic | Hispanic | insulin | 7.5 |
| 42-4 | 64 | 31 | M | Diabetic | Cau | insulin, | 7.9 |
| | | | | | | Micronase | |
| 42-6 | 45 | 31 | M | Diabetic | African | insulin, | 8.1 |
| | | | | | Am | Micronase | |
| 42-8 | 47 | 30 | M | Diabetic | African | insulin, | 7.9 |
| | | | | | Am | Micronase | |
| 42-9 | 39 | 31 | M | Diabetic | Asian | insulin | 5.5 |
| 42-25 | 41 | 31 | M | Non-Diabetic | African | N/A | N/A |
| | | | | | Am | | |
| 42-26 | 61 | 30 | M | Non-Diabetic | Cau | N/A | N/A |
| 42-28 | 50 | 22 | M | Non-Diabetic | Asian | N/A | N/A |
| 42-29 | 62 | 33 | M | Non-Diabetic | Cau | N/A | N/A |
| 42-31 | 51 | 31 | M | Non-Diabetic | Hispanic | N/A | N/A |
| 42-34 | 34 | 31 | M | Non-Diabetic | Asian | N/A | N/A |
| 42-35 | 52 | 28 | M | Non-Diabetic | Hispanic | N/A | N/A |
| 42-37 | 49 | 30 | M | Non-Diabetic | African | N/A | N/A |
| | | | | | Am | | |
| 42-39 | 63 | 24 | M | Non-Diabetic | Cau | N/A | N/A |
| 42-40 | 50 | 25 | M | Non-Diabetic | Cau | N/A | N/A |
| 42-41 | 54 | 21 | M | Non-Diabetic | Hispanic | N/A | N/A |

[0981] Total RNA from each tissue was isolated and used to generate cRNA, which was labeled and hybridized to the proprietary microarray (CuraChip 1.2). Fluorescence intensities of scanned images were quantified and normalized.

[0982] The patients were grouped based on their disease status: Diabetic and Nondiabetic; or based on their BMIs: patients with low BMI (BMI is under 25), patients with medium BMI (BMI is above 25 and below 30) and patients with high BMI (BMI is above 30).

[0983] RTQ-PCR Analysis

[0984] Expression of gene Protein kinase MEK2, CG55838-02 was assessed using the primer-probe set Ag2022, described in Table PA. Results of the RTQ-PCR runs are shown in Tables PD, PE, PG and PH.

[0985] General_screening_panel v1.3 (MEK2) and 1.6 (MEK1) Summary: Protein Kinase MEK2 gene is a ubiquitously expressed gene with the highest level of expression in skeletal muscle (CT=27.4). High expression in one of the major insulin-responsive tissue is in agreement with the results from the GeneCalling study and strengthens the hypothesis that MEK2 contributes to the pathologic insulin-resistant condition in skeletal muscle. In contrast, MEK1 is not expressed in skeletal muscle, but shows ubiquitous expression in cancer tissues. Among the normal tissues, MEK1 shows high expression in brain. Taken together, the data show that MEK2 is the predominant gene expressed in skeletal muscle and liver, thus the preferred target for the treatment of insulin resistance in obesity and/or diabetes.

[0986] Panel 5 Islet Summary (MEK2): Panel 5I shows high expression of the Protein Kinase MEK2 gene in cultured adipocytes, kidney and skeletal muscle (CTs=28-29). Notably, MEK2 was significantly up-regulated in skeletal muscle from a gestational diabetic patient (Patient 12) compared to skeletal muscle of normal patients (Patients 11 and 9) that further strengthens the hypothesis that MEK2 contribute to diabetes and/or obesity.

[0987] CuraChip Results:

[0988] Expression of Protein kinase MEK2, CG55838-02 was assessed using an oligonucleotide specific for the MEK2 gene. The mean value with standard deviation of fluorescence intensity for Protein kinase MEK2 for each patient group was calculated: Diabetic patients, NonDiabetic patients, low BMI patients; medium BMI patients; high BMI patients.

[0989] No change has been detected in MEK2 expression in pancreas, visceral adipose and small intestine between the groups. The expression of Protein kinase MEK2 was elevated in skeletal muscle (psoas) upon an increase in BMI values, however the data were not statistically significant because of the insufficient number of patients in the group (data not shown). In liver the expression of Protein kinase MEK2 was drastically up-regulated in obese patients (FIG. E4). Notably, MEK2 up-regulation in obese liver was more profound in Diabetic patients compared to Nondiabetic patients, suggesting of the role of MEK2 in both obesity and diabetes. In conclusion, CuraChip analysis shows that MEK2 up-regulation positively correlates with obesity, insulin resistance and diabetes in human liver. The findings strengthen the hypothesis that inhibition of MEK2 may be beneficial for the treatment of obesity and/or diabetes.

[image]

[0990] Biochemistry/Cell Line Expression/Screening Assay Formulation

[0991] Assays for screening for antibody therapeutics or small molecule drugs targeting human Protein kinase MEK2 can be formulated utilizing the recombinant protein or endogenous MEK2 expressed in cell lines (non-exhaustive list of them from the RTQ-PCR results shown above).

[0992] To assay the serine/threonine kinase activity of Protein kinase MEK2 the phosphorylation reaction with generic/specific peptide substrate[s] and ³²P-ATP followed by the measurement of incorporation of radioactive phosphate into the substrate can be utilized. To assess full activity of Protein kinase MEK2, the active, phosphorylated form of MEK2 should be used in the screening; endogenously phosphorylated MEK2 can be obtained by immunoprecipitation from activated cells or by use of a constitutively active mutant of MEK2 (S222E/S226D) in the screen. To assure the selectivity of the compounds, endogenous substrates may be used such as recombinant ERK1/2. To evaluate the efficacy of the compound, several cellular assays can be used such as insulin-stimulated glucose up-take in insulin-responsive cells or insulin-stimulated lipolysis in adipocytes.

[0993] Physical cDNA Clone Available for Expression and Screening Purposes

[0994] Materials and Methods

[0995] Exon Linking: The cDNA coding for the CG55838-02 sequence was cloned by the polymerase chain reaction (PCR) using the primers designed based on known cDNA sequences or in silico predictions of the full length or some portion (one or more exons) of the cDNA/protein sequence of the invention. These primers were used to amplify a cDNA from a pool containing expressed human sequences derived from the following tissues: adrenal gland, bone marrow, brain-amygdala, brain-cerebellum, brain-hippocampus, brain-substantia nigra, brain-thalamus, brain-whole, fetal brain, fetal kidney, fetal liver, fetal lung, heart, kidney, lymphoma-Raji, mammary gland, pancreas, pituitary gland, placenta, prostate, salivary gland, skeletal muscle, small intestine, spinal cord, spleen, stomach, testis, thyroid, trachea and uterus.

[0996] Physical Clone: The PCR product derived by exon linking, covering the entire open reading frame, was cloned into the pCR2.1 vector from Invitrogen to provide clones used for expression and screening purposes.

[0997] In Frame Cloning: In frame cloning is a process designed to insert DNA sequences into expression vectors such that the encoded proteins can be produced. The expressed proteins were either full length or corresponding to specific domains of interest. The PCR template was based on a previously identified plasmid (the PCR product derived by exon linking, covering the entire open reading frame) when available, or on human cDNA(s). The human cDNA pool was composed of 5 micrograms of each of the following human tissue cDNAs: adrenal gland, whole brain, amygdala, cerebellum, thalamus, bone marrow, fetal brain, fetal kidney, fetal liver, fetal lung, heart, kidney, liver, lymphoma, Burkitt's Raji cell line, mammary gland, pancreas, pituitary gland, placenta, prostate, salivary gland, skeletal muscle, small Intestine, spleen, stomach, thyroid, trachea, uterus. For downstream cloning purposes, the forward and reverse primers included in-frame restriction sites. The amplified product was detected by agarose gel electrophoresis. The fragment was gel-purified and ligated into the pCR2.1 vector (Invitrogen, Carlsbad, Calif.) following the manufacturer's recommendation. Twenty four clones per transformation were picked and a quality control step was performed to verify that these clones contain an insert of the anticipated size. Subsequently, eight of these clones were sequenced, and assembled in a fashion similar to the SeqCalling process. In addition to analysis of the entire sequence assembly, sequence traces were evaluated manually.

[0998] The CG55838-02 gene described above, encoding the human Protein Kinase MEK2, represents a full-length physical clone and may be used directly for expression and screening purposes. Although the sequences are the preferred isoforms, any of the other isoforms may be used for similar purposes. Furthermore, under varying assay conditions may dictate which isoform may supplant the listed isoforms.

### Example F

### PathCalling Interaction

### Example F1

### Interactions of CG57509-02 in the Calpain-3 Pathway

[0999] Analysis of Novel Interactions in the Calpain 3 Pathway

[1000] The present invention discloses novel associations of proteins and polypeptides and the nucleic acids that encode them, as identified in a yeast-2-hybrid screen using a cDNA library or one-by-one matrix reactions. The proteins and related proteins that are similar to them are encoded by a cDNA and/or by genomic DNA and were identified in some cases by CuraGen Corporation.

[1001] In the current invention, protein interactions may include the interaction of a protein fragment with full-length protein, a protein fragment with another protein fragment, or full-length proteins with each other. The protein interactions disclosed in the present invention may also represent significant discoveries of functional importance to specific diseases or pathological conditions in which novel proteins are found to be components of known pathways, known proteins are found to be components of novel pathways, or novel proteins are found to be components of novel pathways.

[1002] The Calpain protein(s), and protein family(ies), its interactors and any variants, thereof, are suitable as targets for antibody therapeutics, protein drugs, and/or targets for small molecule drugs. As such, the presence of these complexes and pathways and their disregulation may be used as a marker or as a diagnostic for identifying specific pathological states, as targets for therapeutic intervention, in screens of small molecule compounds and/or pharmaceuticals, or for use in cellular or animal models. Thus, the current disclosure includes as an embodiment of the current invention, the cloned nucleic acid sequences, vectors, transfected and/or transformed cell lines, animal models, recombinantly expressed and/or endogenously expressed protein.

[1003] The compositions of the present invention will have efficacy for treatment of patients suffering from: cancer; inflammation and autoimmune disorders including Crohn's disease, IBD, allergies, rheumatoid and osteoarthritis, inflammatory skin disorders, allergies, blood disorders; colon cancer, leukemia AIDS; metabolic disorders including diabetes and obesity; pancreatic disorders including pancreatic insufficiency and cancer; and prostate disorders including prostate cancer and other diseases, disorders and conditions of the like.

[1004] In one aspect, the present invention provides a method of identifying novel proteins, protein interactions, complexes, and/or pathways that are candidates for therapeutic intervention in treating a disease, pathology, abnormal state or condition through the targeting of an entity, which has a specific association with the disease. Use of the discovery includes:

[1005] 1) use as the basis for a diagnostic or therapeutic intervention for a disease or pathological condition, a protein interaction pair, a complex, collection of interactions, or a pathway that elucidates a previously unappreciated function or biological context for a protein.

[1006] 2) use of a protein or protein complex as affinity reagent(s) (e.g. as in co-immunoprecipitation or affinity chromatography) as a means of purification or for the identification of the presence of another protein component of the interaction.

[1007] 3) use for monitoring the formation of an interaction pair or complex as an indicator of a drug's effect, as in the screen of a library of compounds, to identify a particular cellular condition or state.

[1008] 4) use for the modulation of one component of the pathway in order to elicit changes in the activity or expression of downstream interactors or genes, resulting in the alteration of a particular phenotype.

[1009] 5) use of compounds, such as those identified in a high throughput screen, to perturb or promote the protein interactions themselves.

[1010] 6) use, in the case of enzyme/substrate interactions, for monitoring changes in the enzymatic activity and/or generation of the modified substrate as an indicator, such as in a high throughput screen of compounds.

[1011] The invention includes the novel protein complexes. An aspect of this invention is a method for the detection of the protein complexes and production of recombinant proteins. This aspect includes a method, which assays for protein-protein interactions, which may include full-length proteins, as well as protein fragments that interact in cell-based (yeast-2-hybrid, co-immunoprecipitation) and in vitro assays (affinity chromatography). In another aspect, the identified protein complexes can be used as a diagnostic in determining a specific disease or pathological condition or state, as well as for detection of a predisposition to a disease or pathological condition. Included in this aspect is a method for the use of labeled or fusion proteins for detection, and/or the use of antibodies specific for the individual proteins or the protein complex. The method measures the ability of the proteins to form the complex, and includes the identification of mutations or single nucleotide polymorphisms (SNPs), which may affect the ability of the proteins to form the complex or function normally. Another part of this aspect includes the use of the complex as a target for the treatment of disease or therapeutic intervention such that promoting or abolishing complex formation will affect its biological function and an overall phenotype. Included, as embodiments are the nucleotide sequences of the proteins, any vector constructs, recombinant protein, monoclonal and polyclonal antibodies, modified cell lines, and animal models.

[1012] The invention includes the use of the protein interactors in a complex as affinity reagents. One aspect of this invention includes the use of protein components of the complex in immunoprecipitation experiments to monitor amount of complex formation, as well as to determine the presence or absence of other components of the complex. Antibodies specific for individual components of the complex can be used to pull-down associated proteins in the complex which can then be identified by a second antibody. Basically, the complex can be isolated from native tissue or engineered cell lines expressing the proteins of interest, through antibody or affinity tag specific affinity columns. The presence of the specific complex, or other associated proteins can be determined by staining of electrophoresed proteins, mass spectrometry, or secondary antibodies. An embodiment of this aspect is the use of modified cell lines expressing the proteins or protein fragments of interest, as well as antibodies specific to the proteins and the complexes.

[1013] The invention includes a method to monitor protein interactions or formation of the protein complexes as an indicator of specific state or condition in response to treatment with a drug or pharmaceutical. An aspect of this invention includes the use of antibodies, specific for the protein complex, as a reagent in a method to determine the relative abundance of the complex under various conditions or in specific tissues. An embodiment is the use of recombinant proteins, which may be expressed with “epitope” tags in order to easily monitor their expression and interactions.

[1014] The invention includes a method to modulate a specific phenotype by modulating protein components or complexes, which occur in a related pathway described herein. This can be achieved through modulation with a drug or antibody or antisense oligos, the activity of a protein or complex, the ability of a protein or complex to interact with its biological partner, or the elimination of a protein from a pathway or a complex. Such changes can be observed through monitoring modulation in gene expression of target genes, or the presence or absence of phenotype specific markers. Included as an embodiment of this aspect are vectors, antibodies, libraries of compounds, gene specific antisense oligonucleotides, and cell lines.

[1015] The invention includes the use of the protein complexes in screens of compounds, drugs, and/or pharmaceuticals for identification of chemical agents, which interact with the protein complex and affect the protein-protein interaction itself. As such, the compounds identified can be selected based on their ability to affect the formation of the complex. The use of antibodies specific for the complex can be used to determine the changes, if any, in the amount of complex formed after treatment with a compound versus the untreated controls.

[1016] The invention includes a method for screening compounds, which may have effects on the activity of a complex. Associated with this aspect is a method for monitoring the activity of the complex as an indicator of drug action. This can be performed using standard methods of biochemistry and can be measured by changes in the rate of catalytic activity (V_{Max}) and/or the affinity for substrate (K_{M}). Antibodies to the modified substrate can be used to assay for changes in the activity of the complex of interest in treated versus controls. As an embodiment of this aspect a library of compounds, drugs and/or pharmaceuticals may be used to select for agents, which modulate the specific protein complex.

[1017] Interaction Between Calpain 3 and WNK 1 (Table F1)

[1018] The interactions shown in Table F1 illustrate interactions of Calpain 3 with WNK1 and a voltage gated potassium channel modulatory subunit. Calpain 3 is a well-characterized cysteine protease expressed highly in cardiac tissue. Calpain 3 contains several possible sites for phosphorylation by PKA and PKC, but phosphorylation by WNK kinases, specifically WNK1, has not yet been shown. The calcium dependency of Calpain 3 proteolytic activity is well documented, and known targets of Calpain include primarily structural proteins. The voltage gated potassium channel modulatory subunit protein also contains several EF-hand motifs, which likely mediate calcium binding, consistent with calcium-regulated function and suggestive that these interactions mediate important functions in calcium and potassium-dependent cellular events. The current invention reports heretofore-unknown protein interactions involved in prostate-derived STE20-like kinase (PSK or WNK1) signaling. WNK1 is a member of a new family of protein kinases, which contain a cysteine residue instead of the typical lysine in the active site. WNK1 is expressed in many tissues but particularly high levels are found in kidney, cardiac and skeletal muscle. It has also been shown to activate the JNK-MAPK signaling pathway suggesting likely roles in modulating gene expression as well as cell survival. Recent linkage analysis suggests mutations of WNK1 have a role in some forms of hypertension. The interactions identified here are consistent with a role for WNK1 in proper cardiac, and renal function. WNK1 has been recently shown to be cytoplasmic, so the possibility exists that WNK1 activity is modulated through Calpain 3 proteolysis. The ability of Calpain 3 to cleave WNK1 and its associated effects has yet to be shown. However, this could represent an important step in calcium-dependant signaling events related to hypertension and cardiac, skeletal muscle, and kidney function. Additionally, Calpain 3 mediated proteolysis of the voltage gated potassium channel modulatory subunit has also never been shown but provides an intriguing possibility for the modulation of cardiac excitability and performance in response to hypertensive stress.

[image]

[1019] The sequence for Calpain 3 is NOV23b, SEQ ID NOS 123 and 124. Calpain 3 can also be known as AF127765. The nucleotide and amino acid sequences for WNK1 (SEQ ID NOS 229 and 230) are as follows:

>WNK1
SEQ ID:229
ATGTCTGGCGGCGCCGCAGAGAAGCAGAGCACCACTCCCGGTTCCCTGTTCCTCTCGCCGCCGGCTCCTG
CCCCCAAGATGGCTCCAGCTCCGATTCCTCCGTGGGGGAGAAACTGGGAGCCGCGGGCCGCCGACCCTGT
GACCGGCAGGACCGAGGAGTACAGGCGCCCCCGCCACACTATGGACAAGGACAGCCGTGGGGCGGCCGCG
ACCACTACCACCACTGAGCACCGCTTCTTCCGCCGGAGCGTCATCTGCGACTCCAATGCCACTGCGCTGG
ASCTTCCCGGCCTTCCTCTTTCCCTGCCCCAGCCCAGCATCCCCGCGGCTGTCCCGCAGAGTGCTCCACC
GGAGCCCCACCGCGAAGAGACCGTGACCGCCACCGCCACTTCCCAGGTAGCCCAGCAGCCTCCAGCCGCT
CCCGCCCCTGGGGAACAGGCCGTCGCGGGCCCTGCCCCCTCGACTGTCCCCAGCACTACCAGCAAAGACC
GCCCAGTGTCCCAGCCTAGCCTTGTQGGGAGCAAAGACGACCCGCCGCCGGCGAGAAGTGGCAGCGGCGG
CCCCAGCCCCAAGGAGCCACAGGAGGAACGGAGCCAGCAGCAGGATGATATCGAAGACCTGGACACCAAG
GCCGTGGGAATGTCTAACGATGCCCGCTTTCTCAACTTTGACATCGAAATCGGCAGAGGCTCCTTTAAGA
CGCTCTACAAAGGTCTGGACACTGAAACCACCGTGGAAGTCGCCTGGTGTGAACTGCAGGATCGAAAATT
AACAAAGTCTGAGAGGCAGAGATTTAAAGAAGAAGCTGAAATGTTAAAAGGTCTTCAGCATCCCAATATT
GTTAGATTTTATGATTCCTGGGAATCCACAGTAAAAGGAAAGAAGTGCATTGTTTTGCTGACTGAACTTA
TGACGTCTGGAACACTTAAAACGTATCTGAAAAGGTTTAAAGTGATCAAGATCAAAGTTCTAAGAAGCTG
GTGCCGTCAGATCCTTAAAGGTCTTCAGTTTCTTCATACTCGAACTCCACCTATCATTCACCGCGATCTT
AAATGTGACAACATCTTTATCACCGGCCCTACTGGCTCAGTCAACATTGGAGACCTCGGTCTGGCAACCC
TGAAGCGCGCTTCTTTTGCCAAGAGTGTGATAGGTACCCCAGAGTTCATGGCCCCTGAGATGTATGAGGA
GAAATATGATGAATCCGTTGACGTTTATGCCTTTGGGATGTGCATGCTTGAGATGGCTACATCTGAATAT
CCTTACTCCGAGTGCCAAAATDCTGCGCAGATCTACCGTCGCGTGACCAGTGGGCTGAAGCCAGCCAGTT
TTGACAAAGTAGCAATTCCTGAAGTGAAGGAAATTATTGAAGGATGCATACGACAAAACAAAGATGAAAG
ATATTCCATCAAACACCTTTTGAACCATGCCTTCTTCCAAGAGGAAACAGGAGTACGGGTAGAATTAGCA
CAGGAAGATGATGGAGAAAAAATAGCCATAAAATTATGGCTACGTATTGAAGATATTAAGAAATTAAAGG
GAAAATACAAAGATAATGAAGCTATTGAGTTTTCTTTTGATTTAGAGAGAGATGTCCCAGAAGATGTTCC
ACAAGAAATGGTAGAGTCTGGGTATGTCTGTGAAGCTGATCACAAGACCATGGCTAAAGCTATCAAAGAC
AGAGTATCATTAATTAAGAGGAAACGACAGCAGCGGCAGTTGGTACGGGAGGAGCAAGAAAAAAAAAAGC
AGCAAGACAGCAGTCTCAAACAGCAGGTAGAACAATCCAGTGCTTCCCAGACAGGAATCAAGCAGCTCCC
TTCTGCTAGCACCCGCATACCTACTGCTTCTACCACTTCADCTTCAGTTTCTACACAAGTAGAACCTGAA
GAACCTCAGGCACATCAACATCAACAACTACAGTACCAGCAACCCAGTATATCTGTGTTATCTCATGGGA
CGGTTGACAGTGGTCAGGGATCCTCTGTCTTCACAGAATCTCCAGTGASCAGCCAACAGACAGTTTCATA
TCGTTCCCAACATCAACAGGCACATTCTACAGGCACAGTCCCAGGGCATATACCTTCTACTGTCCAAGCA
CAGTCTCAGCCCCATGGGGTATATCCACCCTCAAGTGTGGCACAGGGCCAGAGCCAGGGTCAGCCATCCT
CAACTAGCTTAACAGGGGTTTCATCTTCCCAACCCATACAACATCCTCAGCAGCAGCAGCGAATACAGCA
GACAGCCCCTCCTCAACAGACAGTGCAGTATTCACTTTCACAGACATCAACCTCCAGTGAGGCCACTACT
GCACAGCCAGTGAGTCAGCCTCAAGCTCCACAAGTCTTGCCTCAAGTATCAGCTGGAAAACAGCTTCCAG
TTTCCCAGCCACTACCAACTATCCAAGGCGAACCTCAGATCCCAGTTGCGACACAACCCTCGGTTGTTCC
AGTCCACTCTGGTGCTCATTTCCTTCCAGTGCGACAGCCGCTCCCTACTCCCTTGCTCCCTCAGTACCCT
GTCTCTCAGATTCCCATATCAACTCCTCATGTGTCTACGGCTCAGACAGGTTTCTCATCCCTTCCCATCA
CAATGCCAGCTGGCATTACTCAGCCTCTGCTCACGTTGGCTTCATCTGCTACAACAGCTGCCATCCCGCG
GGTATCAACTGTGGTTCCTAGTCAGCTTCCAACCCTTCTGCAGCCTGTGACTCAGCTGCCAAGTCAGGTT
CACCCACAGCTCCTACAACCAGCAGTTCAGTCCATGGGAATACCAGCTAACCTTGGACAAGCTGCTGAGG
TTCCACTTTCCTCTGGAGATGTTCTGTACCAGGGCTTCCCACCTCGACTCCCACCACAGTACCCAGGAGA
TTCAAATATTGCTCCCTCTTCCAACGTGGCTTCTGTTTGCATCCATTCTACAGTCCTATCCCCTCCCATG
CCGACAGAAGTACTGGCTACACCTGCCTACTTTCCCACACTCCTGCAGCCTTATGTGGAATCAAATCTTT
TAGTTCCTATGGGTCGTGTAGGAGGACAGGTTCAAGTGTCCCAGCCAGGAGGCAGTTTAGCACAAGCCCC
CACTACATCCTCCCAGCAAGCAGTTTTGGAGAGTACTCAGGGAGTCTCTCAGGTTCCTCCTGCACACCCA
GTTGCAGTAGCACAGCCCCAAGCTACCCAGCCGACCACTTTGGCTTCCTCTGTAGACAGTGCACATTCAG
ATGTTGCTTCAGGTATGAGTGATGGCAATDACAACCTCCCATCTTCCAGTGGAAGGCATGAAGGAAGAAC
TACAAAACGGCATTACCGAAAATCTGTAAGGAGTCGCTCTCGACATGAAAAAACTTCACGCCCAAAATTA
AGAATTTTGAATGTTTCAAATAAAGGAGACCGAGTAGTAGAATGTCAATTAGAGACTCATAATAGGAAAA
TGGTTACATTCAAATTTGACCTAGATGGTGACAACCCCGAGGACATAGCAACAATTATGGTGAACAATGA
CTTTATTCTAGCAATAGAGAGAGAGTCGTTTGTGGATCAAGTGCGAGAAATTATTGAAAAAGCTGATGAA
ATGCTCAGTGAGGATGTCAGTGTGGAACCAGAGGGTGATCAGGGATTGGAGAGTCTACAAGGAAACGATC
ACTATGGCTTTTCAGGTTCTCAGAAATTGGAAGGAGAGTTCAAACAACCAATTCCTGCGTCTTCCATGCC
ACAGCAAATAGGCATTCCTACCAGTTCTTTAACTCAAGTTGTTCATTCTGCGGGAAGGCGGTTTATAGTG
AGTCCTGTGCCAGAAAGCCGATTACGAGAATCAAAAGTTTTCCCCAGTGAAATAACAGATACAGTTGCTG
CCTCTACAGCTCAGAGCCCTGGAATGAACTTGTCTCACTCTGCATCATCCCTTAGTCTACAACAGGCCTT
TTCTGAACTTAGACGTGCCCAAATGACAGAAGGACCCAACACAGCACCTCCAAACTTTAGTCATACAGGA
CCAACATTTCCAGTAGTACCTCCTTTCTTAAGTAGCATTGCTGGAGTCCCAACCACAGCAGCAGCCACAG
CACCAGTCCCTGCAACAAGCAGCCCTCCTAATGACATTTCCACATCAGTAATTCAGTCTGAGGTTACAGT
GCCCACTCAAGACGGGATTGCTGGAGTTGCCACCAGCACAGGTGTGGTAACTTCACGTGCTCTCCCCATA
CCACCTGTGTCTGAATCACCAGTACTTTCCAGCGTAGTTTCAAGTATCACAATACCTGCAGTTGTCTCAA
TATCTACTACATCCCCCTCACTTCAAGTCCCCACATCCACATCTGAGATCGTTGTTTCTAGTACAGCACT
GTATCCTTCAGTAACAGTTTCAGCAACTTCAGCCTCTGCAGGGGGCAGTACTGCTACCCCAGGTCCTAAG
CCTCCAGCTGTAGTATCTCAGCAGGCAGCAGGCAGCACTACTGTGGGAGCCACATTAACATCAGTTTCTA
CCACCACTTCATTCCCAAGCACAGCTTCACAGCTGTCCATTCACCTTAGCAGCAQTACTTCTACTCCTAC
TTTAGCTGAAACCGTGGTAGTTAGCGCACACTCACTAGATAAGACATCTCATAGCAGTACAACTGGATTG
GCTTTCTCCCTCTCTGCACCATCTTCCTCTTCCTCTCCTGGAGCAGGAGTGTCTAGTTATATTTCTCAGC
CTGGTGGGCTGCATCCTTTGGTCATTCCATCAGTGATAGCTTCTACTCCTATTCTTCCCCAAGCAGCAGG
ACCTACTTCTACACCTTTATTACCCCAAGTACCTAGTATCCCACCCTTGGTACAGCCTGTTGCCAATGTG
CCTCCTGTACACCAGACACTAATTCATAGTCAGCCTCAACCAGCTTTGCTTCCCAACCAGCCCCATACTC
ATTGTCCTGAAGTAGATTCTGATACACAACCCAAAGCTCCTGGAATTGATGACATAAAGACTCTAGAAGA
AAAGCTGCGGTCTCTGTTCAGTGAACACAGCTCATCTGGAGCTCAGCATCCCTCTGTCTCACTGGAGACC
TCACTAGTCATAGAGAGCACTGTCACACCAGGCATCCCAACTACTGCTGTTGCACCAAGCAAACTCCTGA
CTTCTACCACAAGTACTTGCTTACCACCAACCAATTTACCACTAGGAACAGTTGCTTTGCCAGTTACACC
AGTCGTCACACCTGGGCAAGTTTCTACCCCAGTCAGCACTACTACATCAGGAGTGAAACCTGGAACTCCT
CCCTCCAAGCCACCTCTAACTAAGGCTCCGGTCCTCCCAGTGCGTACTGAACTTCCAGCAGGTACTCTAC
CCAGCGAGCACCTCCCACCTTTTCCAGGACCTTCTCTAACCCAGTCCCAQCAACCTCTACAGGATCTTGA
TGCTCAATTGAGAAGAACACTTAGTCCAGAGATTATCACACTGACTTCTGCGGTTGGTCCTGTGTCCATG
GCGGCTCCAACACCAATCACAGAAGCAGGAACACAGCCTCAGAAGGGTGTTTCTCAAGTCAAAGAAGCCC
CTGTCCTAGCAACTAGTTCAGGAGCTGGTGTTTTTAAGATGGGACGATTTCAGGTTTCTGTTGCAGCAGA
CGGTGCCCAGAAAGAGGGTAAAAATAAGTCAGAAGATGCAAAGTCTGTTCATTTTGAATCCAGCACCTCA
GAGTCCTCAGTGCTATCAAGTAGTAGTCCAGACAGTACCTTGGTGAAACCAGAGCCGAATGGCATAACCA
TCCCTCGTATCTCTTCAGATGTGCCAGAGAGTGCCCACAAAACTACTGCCTCAGAGGCAAAGTCAGACAC
TGGGCAGCCTACCAAGGTTGGACGTTTTCAGGTGACAACTACAGCAAACAAAGTGGGTCGTTTCTCTGTA
TCAAAAACTGAGCACAAGATCACTGACACAAAGAAACAAGGACCAGTCGCATCTCCTCCTTTTATCCATT
TGGAACAAGCTGTTCTTCCTGCTGTGATACCAAAGAAAGAGAAGCCTGAACTGTCAGAGCCTTCACATCT
AAATGGCCCGTCTTCTGACCCGCAGGCCGCTTTTTTAAGTACCGATCTCGATCATGGTTCCGGTAGTCCA
CACTCGCCCCATCAGCTGAGCTCAAAGAGCCTTCCTAGCCAGAATCTAAGTCAAAGCCTTAGTAATTCAT
TTAACTCCTCTTACATGAGTAGCGACAATGAGTCACATATCCAAGATGAAGACTTAAAGTTAGAGCTGCG
ACGACTACGAGATAAACATCTCAAAGAGATTCAGGACCTGCAGAGTCGCCAGAAGCATGAAATTGAATCT
TTGTATACCAAACTGGGCAAGGTGCCCCCTGCTGTTATTATTCCCCCACCTGCTCCCCTTTCAGGGAGAA
GACGACGACCCACTAAAAGCAAAGGCAGCAAATCTAGTCGAAGCAGTTCCTTGGGGAATAAAAGCCCCCA
GCTTTCAGGTAACCTGTCTGCTCACAGTGCAGCTTCAGTCTTCCACCCCCAGCAGACCCTCCACCCTCCT
GGCAACATCCCACAGTCCGGGCAGAATCAGCTGTTACAGCCCCTTAAGCCATCTCCCTCCAGTGACAACC
TCTATTCAGCCTTCACCAGTGATGGTGCCATTGCAGTACCAAGCCTTTCTGCTCCAGGTCAAGGAACCAG
CACCACAAACACTGTTCCGCCAACAGTGAACAGCCAAGCCGCCCAAGCTCAGCCTCCTGCCATGACGTCC
AGCAGGAAGGGCACATTCACAGATGACTTGCACAAGTTGGTAGACAATTGGGCCCGAGATGCCATGAATC
TCTCAGGCACGAGAGCAAGCAAACGGCACATGAATTACGAGGGCCCTGGAATGGCAAGGAAGTTCTCTGC
ACCTCCGCAACTGTGCATCTCCATGACCTCGAACCTGGGTGGCTCTGCCCCCATCTCTGCAGCATCAGCT
ACCTCGCTAGGTCACTTCACCAAGTCTATGTGCCCCCCACAGCAGTATGGCTTTCCAGCTACCCCATTTG
GCGCTCAATGGAGTGGGACCGGTGCCCCAGCACCACAGCCACTTCGCCAGTTCCAACCTGTGGCAACTGC
CTCCTTGCAGAATTTCAACATCAGCAATTTGCAGAAATCCATCAGCAACCCCCCAGGCTCCAACCTCCCC
ACCACTTAG
>WNK1
SEQ ID:230
MSGGAAEKQSSTPGSLFLSPPAPAPKNGSSSDSSVGEKLGAAAADAVTGRTEEYRRRRHTMDKDSRGAAA
TTTTTEHRFFRRSVICDSNATALELPGLPLSLPQPSIPAAVPQSAPPEPHREETVTATATSQVAQQPPAA
AAPGEQAVAGPAPSTVPSSTSKDRPVSQPSLVGSKEEPPPARSGSGGGSAKEPQEERSQQQDDIEELETK
AVGMSNHGRFLKFDIEIGRGSFKTVYKGLDTETTVEVAWCELQDRKLTKSERQRFKEEAEMLKGLQHPNI
VRFYDSWESTVKGKKCIVLVThLMTSGTLKTYLKRFKVMKIKVLRSWCRQILKGLQFLHTRTPPIIHRDL
KCDNIFITCPTGSVKIGDLGLATLKASFAKSVIGTPEFMAPEMYEEKYDESVDVYAFGMCMLEMNATSEY
PYSECQNAAQIYRRVTSGVKPASFDKVAIPEVKEIIEGCIRQNKDERYSIKDLLNHAFFQEETGVRVELA
EEDDGEKIAIKLWLRIEDIKKLKGKYKDAEAIEFSFDLERDVPEDVAQEMVESGYVCEGDHKTMAKAIKD
RVSLIKRKREQRQLVREEQEKKKQEESSLKQQVEQSSASQTGIKQLPSASTGIPTASTTSASVSTQVEPE
EPEADQHQQLQYQQPSISVLSDGTVDSGQGSSVFTESRVSSQQTVSYGSQHEQAHSTGTVPGHIPSTVQA
QSQPHGVYPPSSVAQGQSQGQPSSSSLTGVSSSQPIQHPQQQQGIQQTAPPQQTVQYSLSQTSTSSEATT
AQPVSQPQAPQVLPQVSAGKQLPVSQPVPTIQGEPQIPVATQPSVVPVHSGAHFLPVGQPLPTPLLPQYP
VSQIPISTPHVSTAQTGFSSLPITMAACITQPLLTLASSATTAAIPGVSTVVPSQLPTLLQPVTQLPSQV
HPQLLQPAVQSMGTPANLGQAAEVPLSSGDVLYQGFPPRLPPQYPGDSNIAPSSNVASVCIHSTVLSPPM
PTEVLATPGYFPTVVQPYVESNLLVPMGGVGGQVQVSQPGGSLAQAPTTSSQQAVLESTQGVSQVAPAEP
VAVAQPQATQPTTLASSVDSAHSDVASGMSDGNSNVPSSSGRHEGRTTKRHYRKSVRSRSRHEKTSRPKL
RILNVSNKGDRVVECQLETHNRKMVTFKFDLDGDNPEEIATIMVNNDFILAIERESFVDQVREITEKADE
MLSEDVSVEPEGDQGLESLQGKDDYGFSGSQKLEGEFKQPIPASSMPQQIGIPTSSLTQVVHSAGRRFIV
SPVPESRLRESKVFPSEITDTVAASTAQSPGMNLSHSASSLSLQQAFSELRRAQMTEGPNTAPPNFSHTG
PTFPVVPPFLSSIAGVPTTAAATAPVPATSSPPNDISTSVIQSEVTVPTEEGIAGVATSTGVVTSGGLPI
PPVSESPVLSSVVSSITIPAVVSISTTSPSLQVPTSTSEIVVSSTALYPSVTVSATSASAGGSTATPGPK
PPAVVSQQAAGSTTVGATLTSVSTTTSFPSTASQLSIQLSSSTSTPTLAETVVVSAHSLDKTSHSSTTCL
AFSLSAPSSSSSPGAGVSSYISQPCGLHPLVIPSVTASTPILPQAAGPTSTPLLPQVPSIPPLVQPVANV
PAVQQTLIHSQPQPALLPNQPHTHCPEVDSDTGPKAPGIDDIKTLEEKLRSLFSEHSSSGAQHASVSLET
SLVIESTVTPGIPTTAVAPSKLLTSTTSTCLPPTNLPLGTVALPVTPVVTPGQVSTPVSTTTSGVKPGTA
PSKPPLTKAPVLPVGTELPAGTLPSEQLPPFPGPSLTQSQQPLEDLDAQLRRTLSPEIITVTSAVGPVSM
AAPTAITEAGTQPQKGVSQVKEGPVLATSSGAGVFKMGRFQVSVAADGAQKEGKNKSEDAKSVHFESSTS
ESSVLSSSSPESTLVKPEPNCITTPGISSDVPESAHKTTASEAKSDTGQPTKVGRFQVTTTANKVGRFSV
SKTEDKITDTKKEGPVASPPFMDLEQAVLPAVIPKKEKPELSEPSHHNGPSSDPEAAFLSRDVDDGSGSP
HSPHQLSSKSLPSQWLSQSLSNSFNSSYMSSDNESDIEDEDLKLELRRLRDKHLKEIQDLQSRQKHEIES
LYTKLCKVPPAVTIPPAAPLSGRRRRPTKSKGSKSSRSSSLGNKSPQLSGNLSGQSAASVLHPQQTLHPP
GNIPESGQNQLLQPLKPSPSSDNLYSAFTSDGAISVPSLSAPGQGTSSTNTVGATVNSQAAQAQPPAMTS
SRKGTFTDDLHKLVDNWARDAMNLSGRRGSKGHMNYEGPGMARKFSAPGQLCISMTSNLGGSAPISAASA
TSLGHFTKSMCPPQQYGFPATPFCAQWSGTCCPAPQPLCQFQPVCTASLQFNISNGLQKSISMPPCSMLR
TT

[1020] Segments of Each Protein Used in Y-2-H Screen (Table F2)

[image]

[1021] The interaction of Calpain 3 with WNK1 is mediated by several hundred amino acids in the extreme carboxy-terminus. This region is distinct from the catalytic site of WNK1 (at least in terms of primary structure), and may hence represent either an interaction event which is necessary for subsequent WNK1-dependent phosphorylation of Calpain 3, Calpain 3-dependent proteolytic cleavage of WNK1, or possibly an interaction event independent of their respective catalytic activities but is critical to proper signaling events or localization. We can hypothesize that the interaction of Calpain 3 with the voltage dependent potassium channel modulatory subunit likely represents a proteolytic event, which would result in altered function of potassium channel functions. Precise determination of the sites of interaction of Calpain 3 with either protein remains to be identified. Additional information concerning Calpain 3 is the identification by CuraGen Corporation of a novel splice form, which contains a 48 amino acid deletion (aa 268-315) within the cysteine protease domain. In addition to its known expression in cardiac tissue, RTQ analysis of Calpain 3 indicate that expression is observed in skeletal muscle, kidney, and lung epithelium activated by exposure to TNF-alpha. The proteins and interactions disclosed herein represent plausible therapeutic targets for the treatment of hypertension, heart disease, pseudohypoaldosteronism type II, hyperkalemia, emphysema, asthma as well as others.

[1022] Method of Identifying the Nucleic Acids and Proteins, which Constitute the Interactions of this Invention.

[1023] PathCalling™

[1024] The sequence of PRKWNK1, Calpain 3, and voltage dependent potassium channel modulatory subunit were derived by laboratory cloning of cDNA fragments, by in silico prediction of the sequence. cDNA fragments covering either the full length of the DNA sequence, or part of the sequence, or both, were cloned. In silico prediction was based on sequences available in CuraGen's proprietary sequence databases or in the public human sequence databases, and provided either the full-length DNA sequence, or some portion thereof.

[1025] The laboratory cloning was performed using one or more of the methods summarized below:

[1026] cDNA libraries were derived from various human samples representing multiple tissue types, normal and diseased states, physiological states, and developmental states from different donors. Samples were obtained as whole tissue, primary cells or tissue cultured primary cells or cell lines. Cells and cell lines may have been treated with biological or chemical agents that regulate gene expression, for example, growth factors, chemokines or steroids. The cDNA thus derived was then directionally cloned into the appropriate two-hybrid vector (Gal4-activation domain (Gal4-AD) fusion). Such cDNA libraries as well as commercially available cDNA libraries from Clontech (Palo Alto, Calif.) were then transferred from E. coli into a CuraGen Corporation proprietary yeast strain (disclosed in U.S. Pat. Nos. 6,057,101 and 6,083,693, incorporated herein by reference in their entireties).

[1027] Gal4-binding domain (Gal4-BD) fusions of a CuraGen Corporation proprietary library of human sequences was used to screen multiple Gal4-AD fusion cDNA libraries resulting in the selection of yeast hybrid diploids in each of which the Gal4-AD fusion contains an individual cDNA. Each sample was amplified using the polymerase chain reaction (PCR) using non-specific primers at the cDNA insert boundaries. Such PCR product was sequenced; sequence traces were evaluated manually and edited for corrections if appropriate. cDNA sequences from all samples were assembled together, sometimes including public human sequences, using bioinformatic programs to produce a consensus sequence for each assembly. Each assembly is included in CuraGen Corporation's database. Sequences were included as components for assembly when the extent of identity with another component was at least 95% over 50 bp. Each assembly represents a gene or portion thereof and includes information on variants, such as splice forms single nucleotide polymorphisms (SNPs), insertions, deletions and other sequence variations.

[1028] Physical clone: the cDNA fragment derived by the screening procedure, covering the entire open reading frame is, as a recombinant DNA, cloned into pACT2 plasmid (Clontech) used to make the cDNA library. The recombinant plasmid is inserted into the host and selected by the yeast hybrid diploid generated during the screening procedure by the mating of both CuraGen Corporation proprietary yeast strains N106′ and YULH (U.S. Pat. Nos. 6,057,101 and 6,083,693) to provide the clones.

[1029] Interaction protein pairs are added to CuraGen's PathCalling™ Protein Interaction Database. This database allows for the discovery of novel pharmaceutical drug targets by virtue of their interactions and/or presence in pathologically related signaling pathways. Protein interactions are subsequently analyzed using bioinformatic tools within GeneScape™, which provides a means of visualization of binary protein interactions, protein complex formation, as well as complete cellular signaling pathways. Specifically, the sequences, which encode PRKWNK1, Calpain 3, and voltage dependent potassium channel modulatory subunit proteins were found to interact and may result in the formation of a protein complex, or may constitute a series of complexes, which form in order to propagate a cellular signal, which is physiologically relevant to a disease pathology. The specific interactions, which constitute the specific complexes, may also be useful for therapeutic intervention through the use of recombinant protein or antibody therapies, small molecule drugs, or gene therapy approaches. Protein interactions, which are identified through the mining of the PathCalling™ database, can be screened in vitro and in vivo to provide expression, functional, biochemical, and phenotypic information. Assays may be used alone or in conjunction and include, but are not limited to the following technologies; RTQ-PCR, Transfection of recombinant proteins, Co-immunoprecipitation and mass spectrometry, FRET, Affinity Chromatography, Immunohistochemisty or Immunocytochemistry, gene CHIP hybridizations, antisense (i.e. knock-down, knock-up), GeneCalling experiments, and/or biochemical assays (phosphorylation, dephosphorylation, protease, etc.).

[1030] SeqCalling™ Technology

[1031] cDNA was derived from various human samples representing multiple tissue types, normal and diseased states, physiological states, and developmental states from different donors. Samples were obtained as whole tissue, primary cells or tissue cultured primary cells or cell lines. Cells and cell lines may have been treated with biological or chemical agents that regulate gene expression, for example, growth factors, chemokines or steroids. The cDNA thus derived was then sequenced using CuraGen's proprietary SeqCalling technology. Sequence traces were evaluated manually and edited for corrections if appropriate. cDNA sequences from all samples were assembled together, sometimes including public human sequences, using bioinformatic programs to produce a consensus sequence for each assembly. Each assembly is included in CuraGen Corporation's database. Sequences were included as components for assembly when the extent of identity with another component was at least 95% over 50 bp. Each assembly represents a gene or portion thereof and includes information on variants, such as splice forms single nucleotide polymorphisms (SNPs), insertions, deletions and other sequence variations.

[1032] Uses of the Compositions of the Invention.

[1033] The interaction complexes of Calpain 3 and their relevance to WNK1 and in general to Calpain 3 and WNK1 signaling, provides opportunities to develop tools against various pathologic situations in which signaling through Calpain 3 and WNK1 proteins and Calpain 3 and WNK1 protein complexes are involved. Therefore, the nucleic acids and proteins of the invention are useful in potential diagnostic and therapeutic applications and as a research tool. These include serving as a specific or selective nucleic acid or protein diagnostic and/or prognostic marker, wherein the presence or amount of the nucleic acid or the protein are to be assessed, a means of isolation by virtue of the interacting partners, as well as potential therapeutic applications such as the following: (i) a protein therapeutic, (ii) a small molecule drug target, (iii) an antibody target (therapeutic, diagnostic, drug targeting/cytotoxic antibody), (iv) a nucleic acid useful in gene therapy (gene delivery/gene ablation), and (v) a composition promoting tissue regeneration in vitro and in vivo (vi) biological defense weapon.

[1034] The yeast-2-hybrid system was used to identify the interacting proteins disclosed in the present invention. The proteins involved in these interactions likely participate in the same physiological pathway. Because of the significance of these pathways, the present invention provides a list of uses for these proteins and/or the DNA encoding these proteins, as a basis for developing therapeutic and diagnostic tools. This list includes but is not limited to the following examples.

[1035] Mass Spectrometry (MS)

[1036] For detailed descriptions of mass spectrometry methods see Bonk and Humeny, Neuroscientist, 2001; Gygi and Aebersold, Curr Opinion in Chem Biol, 2000; or Gygi et al., Nature Biotechnology, 1999. Below is a brief description of several MS approaches, which could be employed to assay for protein interactions, modifications and protein compositions.

[1037] Mass Spectrometry is based on the measurement of the mass to charge (m/z) ratio of gas-phase ions. For proteins or peptides this means that they must first be ionized and then vaporized in order for the m/z ratio to be determined. Mass spectrometry is amenable to automation and useful for the identification of low abundance proteins (pico-to zeptomole range), large proteins, peptides, and identification of protein modifications. MS is also useful for the identification of protein interactions and complexes even if the kinetics are relatively fast since desorption occurs on the order of milliseconds.

[1038] One method is matrix-assisted laser-desorption-ionization (MALDI) coupled with time-of-flight (TOF) MS analysis, so called MALDI-TOF. This method involves the use of a light-absorbing matrix, which results in the vaporization of sample molecules and analysis of mass as a function of desorption time. A related technique is surface-enhanced laser desorption ionization (SELDI)-TOF, which has the advantage of not requiring the purification of proteins by using a surface with a defined chemical chromatographic characteristic (e.g. hydrophobic, hydrophilic, cationic, anionic) or biochemical ligands such as proteins, receptors, antibodies, or DNA oligonucleotides. Another variation is tandem mass spectrometry such as the nanoelectrospray (ES) MS/MS, which is the optimum method for ionization/vaporization for the widest range of molecules. To maximize the advantages of various MS methods, the best approach seems to be a hybrid, such as using a tandem array of MALDI ionization or ES coupled with quadrupole-TOF (MS₁) with orthogonal arranged reflectron TOF (MS₂) (Micromass Q-TOF), (for detailed methods see Fandrich et al., 2000). Isotope-coded affinity tag (ICAT) modified proteins combined with protease digestion, microcapillary liquid chromatography and ES MS/MS, allows for the quantification and concurrent sequence identification of individual proteins in complex mixtures even if they are present at low relative abundance. The most recent advance in MS is the electrospray ionization-Fourier transform ion cyclotron resonance mass spectrometry (ESI-FTIR MS), which allows protein identification by accurate mass measurement of a single cysteine-containing peptide and has been shown to be sensitive enough to detect proteins present on the order of 1 ppm (Goodlett et al., 2000).

[1039] Functional Assays

[1040] Interesting two hybrid interactions involving proteins that have enzymatic activities can be validated by cellular assays. Modifications such as phosphorylation, dephosphorylation, proteolysis, ubiquitination, sumoylation, and acetylation can be analyzed by western blotting using specific antibodies.

[1041] Some of the modifications described above can be analyzed in a yeast system. Yeast cells expressing the two interacting proteins, as activation domain (AD) or DNA binding domain (BD)-fusion proteins are grown, and cell extracts are prepared by lysing the cells appropriately. The substrate protein which is expected to be modified, is immunoprecipitated using antibodies specific to the AD or the BD domains. The immunoprecipitates are separated on SDS-PAGE and western blotted using specific antibodies. For identifying phosphorylated proteins, antibodies specific for phospho-tyrosine, or phospho-serine/threonine is used. Similarly, to detect modification by ubiquitination or sumoylation, antibodies specific to these proteins can be used. For proteolysis, the alteration in the mobility of the target protein (change in molecular mass) can be taken as a positive indication for a valid interaction. For each of the assays, control yeast strains expressing only one of the proteins are processed to show that in the absence of the interacting enzyme the substrate protein does not undergo any modification.

[1042] To produce yeast lysates, Remove 1-1.5 ml samples from a yeast culture, freeze samples on dry ice. On ice, add of low-salt lysis Buffer to the cell pellets. Add glass beads, resuspend the cells by a brief vortexing. Lyse the cells by beating the beads for 90 sec. Put the lysate on ice for 5 min and beat the beads again for 90 sec. Put the sample back on ice. Once the lysate has been recovered free of beads, centrifuge the lysate at maximum speed in a microcentrifuge for 3 to 5 min at 4° C. and put the samples on ice. Remove 25 to 50 μl of the supernatant and mix with an equal volume of 2× Protein Sample Buffer and save for Western analysis.

[1043] Immunoprecipitation from yeast: Thaw the lysate samples and put the desired volume (based on the protein concentration) into a fresh microcentrifuge tube. Make all the samples the same volume with fresh low-salt lysis Buffer. Add the antibody diluted in Low-Salt Lysis Buffer (10 μl per sample) and mix by vortexing. Incubate on ice for 30 min.

[1044] ProteinA-Sepharose/Antibody Binding: Equilibrate protein A-Sepharose beads with low-salt lysis Buffer by suspending the beads in low-salt Buffer, centrifuging briefly to sediment the beads and removing the supernatant. Repeat this equilibration wash step 2 or 3 times. Aliquot the Buffer-equilibrated beads into fresh 0.5 ml microcentrifuge tubes making sure that all the tubes have an equal amount of beads. Centrifuge the antibody/extract mixture in a microcentrifuge at full speed for 1 min at 4° C. Recover the supernatant and add it on to the proteinA-Sepharose. Mix in an end-over-end rotator for 1 to 2 hr at 4° C. Centrifuge briefly in a microcentrifuge (bring centrifuge up to full speed and then back down) and remove the supernatant. Keeping the samples on ice as much as possible, wash the beads by adding 400 μl of bead Buffer. Resuspend the beads and centrifuge again. Remove the supernatant. Resuspend the beads in bead Buffer and transfer mixture to a fresh tube and rinse the old tube with more bead-Buffer to recover residual beads to the new tube. Centrifuge the beads, remove the supernatant and wash the beads with Bead Buffer again. If the immunoprecipitate is only for analysis of radio-labeled proteins bound, the beads can be simply resuspended in protein sample Buffer, boiled for 90 sec and electrophoresed. If an enzymatic assay of some sort is involved, the beads should be washed in the reaction Buffer 1 or 2 times.

[1045] In cases where interactions cannot be validated in the yeast system, the interacting proteins are tagged with different epitopes at the N or the C-terminus and expressed in appropriate mammalian cell lines by transient transfection. The cells are grown for 48-72 h, lysed, and the substrate protein is immunoprecipitated using antibody specific to the epitope and analyzed by western blotting as described for the yeast system.

[1046] Fluorescence Resonance Energy Transfer

[1047] Fluorescence resonance energy transfer (FRET) microscopy is a convenient method for studying protein interactions, and the localization of proteins under physiological conditions. FRET requires the use of two fluorophores (a donor and an acceptor), which demonstrate some overlap in their excitation/emission spectra. Excitation of the donor results in light emission of the acceptor, with a concomitant decrease in emission from the donor, provided the spatial separation of the fluorophores is no more than 10 nm. Because FRET is a nondestructive spectroscopic method for measuring protein interactions, it can be done in living cells, either primary cultured cells or immortalized cell lines. The fluorescence lifetime method allows one to monitor FRET signals at the moment of the protein interactions at a resolution on the order of subnanoseconds, providing high temporal, as well as spatial resolution. One method for detecting molecular interactions involves fluorescence resonance energy transfer (FRET) between two GFPs expressed as fusion proteins with the proteins of interest (such as Cyan FP and Yellow FP) or between GFP and a second fluorophore. In the case of CFP-YFP, excitation of the donor, CFP, occurs at 440 nm and emission at 490 nm, while for the acceptor, YFP, excitation is 450 and emission at 535 nm. FRET occurs through exposure of excitation light to the donor at 440 nm, and subsequent measure of the emission of the acceptor at 535 nm. Because these intrinsically fluorescent proteins are extraordinarily stable, they can be used in fusion protein constructs to monitor protein interactions with little concern for their interfering with the fused domain or protein of interest. FRET is defined as the ratio of emission at 535/485 nm, indicating the extent to which YFP is emitting light due to excitation by CFP.

[1048] Other Embodiments

[1049] Although particular embodiments have been disclosed herein in detail, this has been done by way of example for purposes of illustration only, and is not intended to be limiting with respect to the scope of the appended claims, which follow. In particular, it is contemplated by the inventors that various substitutions, alterations, and modifications may be made to the invention without departing from the spirit and scope of the invention as defined by the claims. The choice of nucleic acid starting material, clone of interest, or library type is believed to be a matter of routine for a person of ordinary skill in the art with knowledge of the embodiments described herein. Other aspects, advantages, and modifications considered to be within the scope of the following claims. The claims presented are representative of the inventions disclosed herein. Other, unclaimed inventions are also contemplated. Applicants reserve the right to pursue such inventions in later claims.

The application's sequence listing, which the Patent Office published only in electronic form, follows.

SEQUENCE LISTING (230 sequences)

SEQ ID NO: 1 - DNA, 3840 bp, Homo sapiens
  CDS (35)..(3574)
gcgccggggccggcgatgagcgcgaggagccggcatgagcgcagacagcagccctctcgtgggcagcacgcccaccggttatgggaccctgacgatagggacatcaatagatcccctcagctcctcagtttcatccgtgaggctcagcggctactgtggcagtccatggagggtcatcggctatcacgtcgtggtctggatgatggctgggatccctttgctgctcttccgttggaagcccctgtggggggtgcggctgcggctccggccctgcaacctggcccacgccgaaacactcgttatcgaaataagagacaaagaggatagttcctggcagctcttcactgtccaggtgcagactgaggccatcggcgagggcagcctggagccgtccccacagtcccaggcagaggatggccggagccaggcggcagttggggcggtaccagagggtgcctggaaggatacggcccagctccacaagagcgaggaggcggtgagtgtcggacagaagcgggtgctgcggtattacctcttccagggccagcgctatatctggatcgagacccagcaagccttctaccaggtcagcctcctggaccatggccgctcttgtgacgacgtccaccgctcccgccatggcctcagcctccaggaccaaatggtgaggaaggccatttacggccccaacgtgatcagcataccggtcaagtcctacccccagctgctggtggacgaggcactgaacccctactatgggttccaggccttcagcatcgcgctgtggctggctgaccactactactggtacgccctgtgcatcttcctcatttcctccatctccatctgcctgtcgctgtacaagaccagaaagcaaagccagactctaagggacatggtcaagttgtccatgcgggtgtgcgtgtgccggccagggggagaggaagagtgggtggactccagtgagctagtgcccggagactgcctggtgctgccccaggagggtgggctgatgccctgtgatgccgccctggtggccggcgagtgcatggtgaatgagagctctctgacaggagagagcattccagtgctgaagacggcactgccggaggggctggggccctactgtgcagagacacaccggcggcacacactcttctgcgggaccctcatcttgcaggcccgggcctatgtgggaccgcacgtcctggcagtggtgacccgcacagggttctgcacggcaaaagggggcctggtgagctccatcttgcacccccggcccatcaacttcaagttctataaacacagcatgaagtttgtggctgccctctctgtcctggctctcctcggcaccatctacagcatcttcatcctctaccgaaaccgggtgcctctgaatgagattgtaatccgggctctcgacctggtgaccgtggtggtgccacctgccctgcctgctgccatgactgtgtgcacgctctacgcccagagccgactgcggagacagggcattttctgcatccacccactgcgcatcaacctggggggcaagctgcagctggtgtgtttcgacaagacgggcaccctcactgaggacggcttagacgtgatgggggtggtgcccctgaaggggcaggcattcctgcccctggtcccagagcctcgccgcctgcctgtggggcccctgctccgagcactggccacctgccatgccctcagccggctccaggacacccccgtgggcgaccccatggacttgaagatggtggagtctactggctgggtcctggaggaagagccggctgcagactcagcatttgggacccaggtcttggcagtgatgagacccccactttgggagccccagctgcaggcaatggaggagcccccggtgccagtcagcgtcctccaccgcttccccttctcttcggctctgcagcgcatgagtgtggtggtggcgtggccaggggccactcagcccgaggcctacgtcaaaggctccccggagctggtggcagggctctgcaaccccgagacagtgcccaccgacttcgcccagatgctgcagagctatacagctgctggctaccgtgtcgtggccctggccagcaagccactgcccactgtgcccagcctggaggcagcccagcaactgacgagggacactgtggaaggagacctgagcctcctggggctgctggtcatgaggaacctactgaagccgcagacaacgccagttatccaggctctgcgaaggacccgcatccgcgccgtcatggtgacaggggacaacctgcagacagcggtgactgtggcccggggctgtggcatggtggccccccaggagcatctgatcatcgtccacgccacccaccctgagcggggtcagcctgcctctctcgagttcctgccgatggagtcccccacagccgtgaatggcgttaaggatcctgaccaggctgcaagctacaccgtggagccagacccccgatccaggcacctggccctcagcgggcccacctttggtatcattgtgaagcacttccccaagctgctgcccaaggtcctggtccagggcactgtctttgcccgcatggcccctgagcagaagacagagctggtgtgcgagctacagaagcttcagtactgcgtgggcatgtgcggagacggcgccaatgactgtggggccctgaaggcggctgatgtcggcatctcgctgtcccaggcagaagcctcagtggtctcacccttcacctcgagcatggccagtattgagtgcgtgcccatggtcatcagggaggggcgctgttcccttgacacttcgttcagcgtcttcaagtacatggctctgtacagcctgacccagttcatctccgtcctgatcctctacacgatcaacaccaacctgggtgacctgcagttcctggccatcgacctggtcatcaccaccacagtggcagtgctcatgagccgcacggggccagcgctggtcctgggacgggtgcggccaccgggggcgctgctcagcgtgcccgtgctcagcagcctgctgctgcagatggtcctggtgaccggcgtgcagctagggggctacttcctgaccctggcccagccatggttcgtgcctctgaacaggacagtggccgcaccagacaacctgcccaactacgagaacaccgtggtcttctctctgtccagcttccagtacctcatcctggctgcagccgtgtccaagggggcgcccttccgccggccgctctacaccaatgtgcccttcctggtggccctggcgctcctgagctccgtcctggtgggccttgtcctggtccccggcctcctgcaggggccgctggcgctgaggaacatcactgacaccggcttcaagctgctgctgctgggtctggtcaccctcaacttcgtgggggccttcatgctggagagcgtgctagaccagtgcctccccgcctgcctgcgccgcctccggcccaagcgggcctccaagaagcgcttcaagcagctggaacgagagctggccgagcagccctggccgccgctgcccgccggccccctgaggtagtgcaggcccacgggcaccccagacactggaactccctgcctctgagccaccaactggacccctctccagcaacaccaccgccaccacctcccacatccctgaggttggcgactgtctacactcctcccccgagaccacccccaccctggggaagcgttgactactgtcccctaccttggaccatcccgcgtaggggtggcagcccccagctcccctcagtgctgctgtcagtgtagcaaataaagtcatgatattttcctggc

SEQ ID NO: 2 - protein, 1180 aa, Homo sapiens
MSADSSPLVGSTPTGYGTLTIGTSIDPLSSSVSSVRLSGYCGSPWRVIGYHVVVWMMAGIPLLLFRWKPLWGVRLRLRPCNLAHAETLVIEIRDKEDSSWQLFTVQVQTEAIGEGSLEPSPQSQAEDGRSQAAVGAVPEGAWKDTAQLHKSEEAVSVGQKRVLRYYLFQGQRYIWIETQQAFYQVSLLDHGRSCDDVHRSRHGLSLQDQMVRKAIYGPNVISIPVKSYPQLLVDEALNPYYGFQAFSIALWLADHYYWYALCIFLISSISICLSLYKTRKQSQTLRDMVKLSMRVCVCRPGGEEEWVDSSELVPGDCLVLPQEGGLMPCDAALVAGECMVNESSLTGESIPVLKTALPEGLGPYCAETHRRHTLFCGTLILQARAYVGPHVLAVVTRTGFCTAKGGLVSSILHPRPINFKFYKHSMKFVAALSVLALLGTIYSIFILYRNRVPLNEIVIRALDLVTVVVPPALPAAMTVCTLYAQSRLRRQGIFCIHPLRINLGGKLQLVCFDKTGTLTEDGLDVMGVVPLKGQAFLPLVPEPRRLPVGPLLRALATCHALSRLQDTPVGDPMDLKMVESTGWVLEEEPAADSAFGTQVLAVMRPPLWEPQLQAMEEPPVPVSVLHRFPFSSALQRMSVVVAWPGATQPEAYVKGSPELVAGLCNPETVPTDFAQMLQSYTAAGYRVVALASKPLPTVPSLEAAQQLTRDTVEGDLSLLGLLVMRNLLKPQTTPVIQALRRTRIRAVMVTGDNLQTAVTVARGCGMVAPQEHLIIVHATHPERGQPASLEFLPMESPTAVNGVKDPDQAASYTVEPDPRSRHLALSGPTFGIIVKHFPKLLPKVLVQGTVFARMAPEQKTELVCELQKLQYCVGMCGDGANDCGALKAADVGISLSQAEASVVSPFTSSMASIECVPMVIREGRCSLDTSFSVFKYMALYSLTQFISVLILYTINTNLGDLQFLAIDLVITTTVAVLMSRTGPALVLGRVRPPGALLSVPVLSSLLLQMVLVTGVQLGGYFLTLAQPWFVPLNRTVAAPDNLPNYENTVVFSLSSFQYLILAAAVSKGAPFRRPLYTNVPFLVALALLSSVLVGLVLVPGLLQGPLALRNITDTGFKLLLLGLVTLNFVGAFMLESVLDQCLPACLRRLRPKRASKKRFKQLERELAEQPWPPLPAGPLR

SEQ ID NO: 3 - DNA, 3540 bp, Homo sapiens
  CDS (35)..(3523)
gcgccggggccggcgatgagcgcgaggagccggcatgagcgcagacagcagccctctcgtgggcagcacgcccaccggttatgggaccctgacgatagggacatcaatagatcccctcagctcctcagtttcatccgtgaggctcagcggctactgtggcagtccatggagggtcatcggctatcacgtcgtggtctggatgatggctgggatccctttgctgctcttccgttggaagcccctgtggggggtgcggctgcggctccggccctgcaacctggcccacgccgaaacactcgttatcgaaataagagacaaagaggatagttcctggcagctcttcactgtccaggtgcagactgaggccatcggcgagggcagcctggagccgtccccacagtcccaggcagaggatggccggagccaggcggcagttggggcggtaccagagggtgcctggaaggatacggcccagctccacaagagcgaggaggcggtgagtgtcggacagaagcgggtgctgcggtattacctcttccagggccagcgctatatctggatcgagacccagcaagccttctaccaggtcagcctcctggaccatggccgctcttgtgacgacgtccaccgctcccgccatggcctcagcctccaggaccaaatggtgaggaaggccatttacggccccaacgtgatcagcataccggtcaagtcctacccccagctgctggtggacgaggcactgaacccctactatgggttccaggccttcagcatcgcgctgtggctggctgaccactactactggtacgccctgtgcatcttcctcatttcctccatctccatctgcctgtcgctgtacaagaccagaaagcaaagccagactctaagggacatggtcaagttgtccatgcgggtgtgcgtgtgccggccagggggagaggaagagtgggtggactccagtgagctagtgcccggagactgcctggtgctgccccaggagggtgggctgatgccctgtgatgccgccctggtggccggcgagtgcatggtgaatgagagctctctgacaggagagagcattccagtgctgaagacggcactgccggaggggctggggccctactgtgcagagacacaccggcggcacacactcttctgcgggaccctcatcttgcaggcccgggcctatgtgggaccgcacgtcctggcagtggtgacccgcacagggttctgcacggcaaaagggggcctggtgagctccatcttgcacccccggcccatcaacttcaagttctataaacacagcatgaagtttgtggctgccctctctgtcctggctctcctcggcaccatctacagcatcttcatcctctaccgaaaccgggtgcctctgaatgagattgtaatccgggctctcgacctggtgaccgtggtggtgccacctgccctgcctgctgccatgactgtgtgcacgctctacgcccagagccgactgcggagacagggcattttctgcatccacccactgcgcatcaacctggggggcaagctgcagctggtgtgtttcgacaagacgggcaccctcactgaggacggcttagacgtgatgggggtggtgcccctgaaggggcaggcattcctgcccctggtcccagagcctcgccgcctgcctgtggggcccctgctccgagcactggccacctgccatgccctcagccggctccaggacacccccgtgggcgaccccatggacttgaagatggtggagtctactggctgggtcctggaggaagagccggctgcagactcagcatttgggacccaggtcttggcagtgatgagacccccactttgggagccccagctgcaggcaatggaggagcccccggtgccagtcagcgtcctccaccgcttccccttctcttcggctctgcagcgcatgagtgtggtggtggcgtggccaggggccactcagcccgaggcctacgtcaaaggctccccggagctggtggcagggctctgcaaccccgagacagtgcccaccgacttcgcccagatgctgcagagctatacagctgctggctaccgtgtcgtggccctggccagcaagccactgcccactgtgcccagcctggaggcagcccagcaactgacgagggacactgtggaaggagacctgagcctcctggggctgctggtcatgaggaacctactgaagccgcagacaacgccagttatccaggctctgcgaaggacccgcatccgcgccgtcatggtgacaggggacaacctgcagacagcggtgactgtggcccggggctgtggcatggtggccccccaggagcatctgatcatcgtccacgccacccaccctgagcggggtcagcctgcctctctcgagttcctgccgatggagtcccccacagccgtgaatggcgttaaggtcctggtccagggcactgtctttgcccgcatggcccctgagcagaagacagagctggtgtgcgagctacagaagcttcagtactgcgtgggcatgtgcggagacggtgccaatgactgtggggccctgaaggcggctgatgtcggcatctcgctgtcccaggcagaagcctcagtggtctcacccttcacctcgagcatggccagtattgagtgcgtgcccatggtcatcagggaggggcgctgttcccttgacacttcgttcagcgtcttcaagtacatggctctgtacagcctgacccagttcatctccgtcctgatcctctacacgatcaacaccaacctgggtgacctgcagttcctggccatcgacctggtcatcaccaccacagtggcagtgctcatgagccgcacggggccagcgctggtcctgggacgggtgcggccaccgggggcgctgctcagcgtgcccgtgctcagcagcctgctgctgcagatggtcctggtgaccggcgtgcagctagggggctacttcctgaccctggcccagccatggttcgtgcctctgaacaggacagtggccgcaccagacaacctgcccaactacgagaacaccgtggtcttctctctgtccagcttccagtacctcatcctggctgcagccgtgtccaagggggcgcccttccgccggccgctctacaccaatgagcgtgctagaccagtgcctccccgcctgcctgcgccgcctccggcccaagcgggcctccaagaagcgcttcaagcagctggaacgagagctggccgagcagccctggccgccgctgcccgccggccccctgaggtagtgcaggcccacgggcaccccagacactggaactccctgcctctgagccaccaactggacccctctccagcaacaccaccgccaccacctcccacatccctgaggttggcgactgtctacactcctcccccgagaccacccccaccctggggaagcgttgactactgtcccctaccttggaccatcccgcgtaggggtggcagcccccagctcccctcagtgctgctgtcagtgtagcaaataaagtcatg

SEQ ID NO: 4 - protein, 1163 aa, Homo sapiens
MSADSSPLVGSTPTGYGTLTIGTSIDPLSSSVSSVRLSGYCGSPWRVIGYHVVVWMMAGIPLLLFRWKPLWGVRLRLRPCNLAHAETLVIEIRDKEDSSWQLFTVQVQTEAIGEGSLEPSPQSQAEDGRSQAAVGAVPEGAWKDTAQLHKSEEAVSVGQKRVLRYYLFQGQRYIWIETQQAFYQVSLLDHGRSCDDVHRSRHGLSLQDQMVRKAIYGPNVISIPVKSYPQLLVDEALNPYYGFQAFSIALWLADHYYWYALCIFLISSISICLSLYKTRKQSQTLRDMVKLSMRVCVCRPGGEEEWVDSSELVPGDCLVLPQEGGLMPCDAALVAGECMVNESSLTGESIPVLKTALPEGLGPYCAETHRRHTLFCGTLILQARAYVGPHVLAVVTRTGFCTAKGGLVSSILHPRPINFKFYKHSMKFVAALSVLALLGTIYSIFILYRNRVPLNEIVIRALDLVTVVVPPALPAAMTVCTLYAQSRLRRQGIFCIHPLRINLGGKLQLVCFDKTGTLTEDGLDVMGVVPLKGQAFLPLVPEPRRLPVGPLLRALATCHALSRLQDTPVGDPMDLKMVESTGWVLEEEPAADSAFGTQVLAVMRPPLWEPQLQAMEEPPVPVSVLHRFPFSSALQRMSVVVAWPGATQPEAYVKGSPELVAGLCNPETVPTDFAQMLQSYTAAGYRVVALASKPLPTVPSLEAAQQLTRDTVEGDLSLLGLLVMRNLLKPQTTPVIQALRRTRIRAVMVTGDNLQTAVTVARGCGMVAPQEHLIIVHATHPERGQPASLEFLPMESPTAVNGVKVLVQGTVFARMAPEQKTELVCELQKLQYCVGMCGDGANDCGALKAADVGISLSQAEASVVSPFTSSMASIECVPMVIREGRCSLDTSFSVFKYMALYSLTQFISVLILYTINTNLGDLQFLAIDLVITTTVAVLMSRTGPALVLGRVRPPGALLSVPVLSSLLLQMVLVTGVQLGGYFLTLAQPWFVPLNRTVAAPDNLPNYENTVVFSLSSFQYLILAAAVSKGAPFRRPLYTNERARPVPPRLPAPPPAQAGLQEALQAAGTRAGRAALAAAARRPPEVVQAHGHPRHWNSLPLSHQLDPSPATPPPPPPTSLRLATVYTPPPRPPPPWGSVDYCPLPWTIPRRGGSPQLPSVLLSV

SEQ ID NO: 5 - DNA, 728 bp, Homo sapiens
  CDS (85)..(621)
ccttccggctggccccgctcggtcacccgcagcaggcgtgcagtttcccggctctctgcgcggccggggaaggtcagcgccgtaatggcgttcttggcgtcgggaccctacctgacccatcagcaaaaggtgttgcggctttataagcgggcgctacgccacctcgagtcgtggtgcgtccagagagacaaataccgatactttgcttgtttgatgagagcccggtttgaagaacataagaatgaaaaggatatggcgaaggccacccagctgctgaaggaggccgaggaagaattctggtaccgtcagcatccacagccatacatcttccctgactctcctgggggcacctcctatgagagatacgattgctacaaggtcccagaatggtgcttagatgactggcatccttctgagaaggcaatgtatcctgattactttgccaagagagaacagtggaagaaactgcggagggaaagctgggaacgagaggttaagcagctgcaggaggaaacgccacctggtggtcctttaactgaagctttgccccctgcccgaaaggaaggtgatttgcccccactgtggtggtatattgtgaccagaccccgggagcggcccatgtagaaagagagagacctcatctttcatgcttgcaagtgaaatatgttacagaacatgcacttgccctaataaaaaatcagtgaaatggtcaaaaaaaaaaaaaaaaa

SEQ ID NO: 6 - protein, 179 aa, Homo sapiens
MAFLASGPYLTHQQKVLRLYKRALRHLESWCVQRDKYRYFACLMRARFEEHKNEKDMAKATQLLKEAEEEFWYRQHPQPYIFPDSPGGTSYERYDCYKVPEWCLDDWHPSEKAMYPDYFAKREQWKKLRRESWEREVKQLQEETPPGGPLTEALPPARKEGDLPPLWWYIVTRPRERPM

SEQ ID NO: 7 - DNA, 510 bp, Homo sapiens
  CDS (80)..(259)
ggcagagccccgctcagtcacccgcagcaggcgtgcagtttcccggctctccgcgcggccggggaaggtcagcgccgtaatggcgttcttggcgtcgggaccctacctgacccatcagcaaaaggtgttgcggctttataagcgggcgctacgccacctcgagtcgtggtgcgtccagagagacaaataccgatactttgcttgtttgatgagagcccggtttgaagaaactgcggagggaaagctgggaacgagaggttaagcagctgcaggaggaaacgccacctggtggtcctttaactgaagctttgccccctgcccgaaaggaaggtgatttgcccccactgtggtggtatattgtgaccagaccccgggagcggcccatgtagaaagagagagacctcatctttcatgcttgcaagtgaaatatgttacagaacatgcacttgccctaataaaaaatcagtgaaatggaaaaaaaaaaaaaaaaaaaaaaaaaaaaaaaaaaaa

SEQ ID NO: 8 - protein, 60 aa, Homo sapiens
MAFLASGPYLTHQQKVLRLYKRALRHLESWCVQRDKYRYFACLMRARFEETAEGKLGTRG

SEQ ID NO: 9 - DNA, 728 bp, Homo sapiens; identical to SEQ ID NO: 5
  CDS (85)..(621)

SEQ ID NO: 10 - protein, 179 aa, Homo sapiens; identical to SEQ ID NO: 6

SEQ ID NO: 11 - DNA, 853 bp, Homo sapiens
  CDS (14)..(571)
gtcggtagtagcgatggcgggtctgactgacttgcagcggctacaggcccgagtggaagagctggagcgctgggtgtacgggccgggcggggcgcgcggctcacggaaggtggctgacggcctggtcaaggtgcaggtggctttggggaacatttccagcaagagggagagggtgaagattctctacaaaaagattgaagatctgatcaagtacctggatcctgagtacatcgaccgcattgccatacctgatgcctctaagctgcaattcatcctagcagaggagcagtttatcctttcccaggttgcactcctggagcaggtgaatgccttggtgcccatgctggacagtgctcacatcaaagccgttcctgagcatgctgcccgcctgcagcgcttggcccagatccacattcagcagcaggaccagtgtgtggaaatcactgaggagtccaaggctctcctggaggaatacaacaagactacaatgcttctctccaagcaattcgtgcagtgggatgagctactttgccagctagaggccgccacgcaagtgaagccagcagaggagtgatagctgctccccatcccaaagtgggcctgggcagtcaggctccagggccctatgccaacctgcctttgttacaaggcagaggaagctttgtatttattggcttcaaggcccacctctctgtactctgggctctaaagttggaggtcaggttacctgaggtttgcaatttgcaacacccaccctccccccaatcagtgttcttatttcagtgacaataaaccatagagatgactggaaaaaaaaaaaaaaaaaaaaaaaaaaaaaaaaaaaaaaaaaaaa

SEQ ID NO: 12 - protein, 186 aa, Homo sapiens
MAGLTDLQRLQARVEELERWVYGPGGARGSRKVADGLVKVQVALGNISSKRERVKILYKKIEDLIKYLDPEYIDRIAIPDASKLQFILAEEQFILSQVALLEQVNALVPMLDSAHIKAVPEHAARLQRLAQIHIQQQDQCVEITEESKALLEEYNKTTMLLSKQFVQWDELLCQLEAATQVKPAEE

SEQ ID NO: 13 - DNA, 540 bp, Homo sapiens
  CDS (14)..(487)
gtcggtagtagcgatggcgggtctgactgacttgcagcggctacaggcccgagtggaagagctggagcgctgggtgtacgggccgggcggggcgcgcggctcacggaaggtggctgacggcctggtcaaggtgcaggtggctttggggaacatttccagcaagagggagagggtgaagattctctacaaaaagattgaagatctgatcaagtacctggatcctgagtacatcgaccgcattgccatacctgatgcctctaagctgcaattcatcctagcagccgttcctgagcatgctgcccgcctgcagcgcttggcccagatccacattcagcagcaggaccagtgtgtggaaatcactgaggagtccaaggctctcctggaggaatacaacaagactacaatgcttctctccaagcaattcgtgcagtgggatgagctactttgccagctagaggccgccacgcaagtgaagccagcagaggagtgatagctgctccccatcccaaagtgggcctgggcagtcaggctccagggccc

SEQ ID NO: 14 - protein, 158 aa, Homo sapiens
MAGLTDLQRLQARVEELERWVYGPGGARGSRKVADGLVKVQVALGNISSKRERVKILYKKIEDLIKYLDPEYIDRIAIPDASKLQFILAAVPEHAARLQRLAQIHIQQQDQCVEITEESKALLEEYNKTTMLLSKQFVQWDELLCQLEAATQVKPAEE

SEQ ID NO: 15 - DNA, 3570 bp, Homo sapiens
  CDS (43)..(3453)
atcacgcgtatccaggcccagtcccgaggtgtgctcgccagaatggagtacaaaaagctgctggaacgtagagactccctgctggtaatccagtggaacattcgggccttcatgggggtcaagaattggccctggatgaagctctacttcaagatcaagccgctgctgaagagtgcagaaagagagaaggagatggcctccatgaaggaggagttcacacgcctcaaagaggccctagagaagtccgaggctcgccgcaaggaactcgaggagaagatggtgtccctgctgcaggagaagaatgacctgcagctccaagtgcaggcggaacaagacaacctggcagatgctgaggagcgctgtgatcagctgatcaaaaacaagattcagctggaggccaaggtgaaggagatgaacgagaggctggaggatgaggaggagatgaatgctgagctcactgccaagaagcgcaagctggaagatgagtgctcagagctcaaaagggacatcgatgatctggagctgacactggccaaagtggagaaggagaaacacgcaacagagaacaaggtgaaaaacctgacagaggagatggctgggctggatgagatcattgccaagctgaccaaggagaagaaagctctgcaagaggcccaccaacaggctctggatgaccttcaggccgaggaggacaaggtcaacaccctgactaaggccaaagtcaagctggagcagcaagtggatgatctggaaggatccctggagcaagagaagaaggtgcgcatggacctggagcgagcgaagcggaagctggagggcgacctgaagctgacccaggagagcatcatggacctggagaatgacaagcagcagctggaggagcggctgaaaaaaaaagactttgagctgaatgctctcaacgcaaggattgaggatgaacaggccctcggcagccagctgcagaagaagctcaaggagcttcaggcacgcatcgaggagctggaggaggagctggaggccgagcgcaccgccagggctaaggtggagaagctgcgctcagacctgtctcgggagctggaggagatcagcgagcggctggaagaggccggcggggccacgtccgtgcagatcgagatgaacaagaagcgcgaggccgagttccagaagatgcggcgggacctggaggaggccacgctgcagcacgaagccactgccgcggccctgcgcaagaagcacgccgacagcgtggccgagctgggcgagcagatcgacaacctgcagcgggtgaagcagaagctggagaaggagaagagcgagttcaagctggagctggatgacgtcacctccaacatggagcagatcatcaaggccaaggctaacctggagaagatgtgccggaccttggaagaccagatgaatgagcaccggagcaaggcggaggagacccagcgttctgtcaacgacctcaccagccagcgggccaagttgcaaaccgagaatggtgagctgtcccggcagctggatgagaaggaggcactgatctcccagctgacccgaggcaagctcacctacacccagcagctggaggacctcaagaggcagctggaggaggaggttaaggcgaagaacgccctggcccacgcactgcagtcggcccggcatgactgcgacctgctgcgggagcagtacgaggaggagacggaggccaaggccgagctgcagcgcgtcctttccaaggccaactcggaggtggcccagtggaggaccaagtatgagacggacgccattcagcggactgaggagctcgaggaggccaagaagaagctggcccagcggctgcaggaagctgaggaggccgtggaggctgttaatgccaagtgctcctcgctggagaagaccaagcaccggctacagaatgagatcgaggacttgatggtggacgtagagcgctccaatgctgctgctgcagccctggacaagaagcagaggaacttcgacaagatcctggccgagtggaagcagaagtatgaggagtcgcagtcggagctggagtcctcgcagaaggaggctcgctccctcagcacagagctcttcaaactcaagaacgcctatgaggagtccctggaacatctggagaccttcaagcgggagaacaaaaacctgcaggaggagatctccgacttgactgagcagttgggttccagcggaaagactatccatgagctggagaaggtccgaaagcagctggaggccgagaagatggagctgcagtcagccctggaggaggccgaggcctccctggagcacgaggagggcaagatcctccgggcccagctggagttcaaccagatcaaggcagagatcgagcggaagctggcagagaaggacgaggagatggaacaggccaagcgcaaccacctgcgggtggtggactcgctgcagacctccctggacgcagagacacgcagccgcaacgaggccctgagggtgaagaagaagatggaaggagacctcaatgagatggagatccagctcagccacgccaaccgcatggccgccgaggcccagaagcaagtcaagagcctccagagcttgttgaaggacacccagattcagctggacgatgcagtccgtgccaacgacgacctgaaggagaacatcgccatcgtggagcggcgcaacaacctgctgcaggctgagctggaggagttgcgtgccgtggtggagcagacagagcggtcccggaagctggcggacgaggagctgattgagactagtgagcgggtgcagctgctgcattcccagaacaccagcctcatcaaccagaagaagaagatggatgctgacctgtcccagctccagactgaagtggaggaggcagtgcaggagtgcaggaatgctgaggagaaggccaagaaggccatcacggatgccgccatgatggcagaggagctgaagaaggagcaggacaccagcgcccacctggagcgcatgaagaagaacatggaacagaccattaaggacctgcagcaccggctggacgaagccgagcagatcgccctcaagggcggcaagaagcagctgcagaagctggaagcgcgggtgcgggagctggagaatgagctggaggccgagcagaagcgcaacgcagagtcggtgaagggcatgaggaagagcgagcggcgcatcaaggagctcacctaccagacggaggaggacaggaaaaacctgctgcggctgcaggacctggtagacaagctgcagctaaaggtcaaggcctacaagcgccaggccgaggaggcggaggagcaagccaacaccaacctgtccaagttccgcaaggtgcagcacgagctggatgaggcagaggagcgggcggacatcgccgagtcccaggtcaacaagctgcgggccaagagccgtgacattggcacgaagggcttgaatgaggagtagctttgccacatcttgatctgctcagccctggaggtgccagcaaagccccatgctggagcctgtgtaacagctccttgggaggaagcagaataaagcaattttccttgaagccga

SEQ ID NO: 16 - protein, 1137 aa, Homo sapiens
MEYKKLLERRDSLLVIQWNIRAFMGVKNWPWMKLYFKIKPLLKSAEREKEMASMKEEFTRLKEALEKSEARRKELEEKMVSLLQEKNDLQLQVQAEQDNLADAEERCDQLIKNKIQLEAKVKEMNERLEDEEEMNAELTAKKRKLEDECSELKRDIDDLELTLAKVEKEKHATENKVKNLTEEMAGLDEIIAKLTKEKKALQEAHQQALDDLQAEEDKVNTLTKAKVKLEQQVDDLEGSLEQEKKVRMDLERAKRKLEGDLKLTQESIMDLENDKQQLEERLKKKDFELNALNARIEDEQALGSQLQKKLKELQARIEELEEELEAERTARAKVEKLRSDLSRELEEISERLEEAGGATSVQIEMNKKREAEFQKMRRDLEEATLQHEATAAALRKKHADSVAELGEQIDNLQRVKQKLEKEKSEFKLELDDVTSNMEQIIKAKANLEKMCRTLEDQMNEHRSKAEETQRSVNDLTSQRAKLQTENGELSRQLDEKEALISQLTRGKLTYTQQLEDLKRQLEEEVKAKNALAHALQSARHDCDLLREQYEEETEAKAELQRVLSKANSEVAQWRTKYETDAIQRTEELEEAKKKLAQRLQEAEEAVEAVNAKCSSLEKTKHRLQNEIEDLMVDVERSNAAAAALDKKQRNFDKILAEWKQKYEESQSELESSQKEARSLSTELFKLKNAYEESLEHLETFKRENKNLQEEISDLTEQLGSSGKTIHELEKVRKQLEAEKMELQSALEEAEASLEHEEGKILRAQLEFNQIKAEIERKLAEKDEEMEQAKRNHLRVVDSLQTSLDAETRSRNEALRVKKKMEGDLNEMEIQLSHANRMAAEAQKQVKSLQSLLKDTQIQLDDAVRANDDLKENIAIVERRNNLLQAELEELRAVVEQTERSRKLADEELIETSERVQLLHSQNTSLINQKKKMDADLSQLQTEVEEAVQECRNAEEKAKKAITDAAMMAEELKKEQDTSAHLERMKKNMEQTIKDLQHRLDEAEQIALKGGKKQLQKLEARVRELENELEAEQKRNAESVKGMRKSERRIKELTYQTEEDRKNLLRLQDLVDKLQLKVKAYKRQAEEAEEQANTNLSKFRKVQHELDEAEERADIAESQVNKLRAKSRDIGTKGLNEE

SEQ ID NO: 17 - DNA, 4775 bp, Homo sapiens
  CDS (87)..(4658)
tgtctttccctgctgctctcaggtcccctgcaggccttggcccctttcctcatctgtagacacacttgagtagcccaggcacagccatgggagattcggagatggcagtctttggggctgccgccccctacctgcgcaagtcagagaaggagcggctagaagcgcagaccaggccttttgacctcaagaaggatgtcttcgtgcctgatgacaaacaggagtttgtcaaggccaagatcgtgtctcgagagggtggcaaagtcactgccgagactgagtatggcaagacagtgaccgtgaaggaggaccaggtgatgcagcagaacccacccaagttcgacaaaatcgaggacatggccatgctgaccttcctgcatgagcccgcggtgctctacaacctcaaggatcgctacggctcctggatgatctacacctactcgggcctcttctgtgtcaccgtcaacccttacaagtggctgccggtgtacactcctgaggtggtggctgcctaccggggcaagaagaggagcgaggccccgccccacatcttctccatctccgacaacgcctatcagtacatgctgacagacagagaaaaccagtccatcctgatcaccggagaatccggagcagggaagacagtcaacaccaagagggtcatccagtactttgctgttattgcagccattggggaccgcagcaagaaggaccagagcccgggcaagggcaccctggaggaccagatcatccaggccaaccctgctctggaggcctttggcaatgccaagaccgtccggaacgacaactcctcccgcttcgggaaattcattcgaattcattttggggcaacaggaaagttggcatctgcagacatagagacctatcttctggaaaaatccagagttattttccagctgaaagcagagagagattatcacattttctaccaaatcctgtctaacaaaaagcctgagctgctggacatgctgctgatcaccaacaacccctacgattatgcattcatctcccaaggagagaccaccgtggcctccattgatgacgctgaggagctcatggccactgataacgcttttgatgtgctgggcttcacttcagaggagaaaaactccatgtataagctgacaggcgccatcatgcactttggaaacatgaagttcaagctgaagcagcgggaggagcaggcggagccagacggcactgaagaggctgacaagtctgcctacctcatggggctgaactcagccgacctgctcaaggggctgtgccaccctcgggtgaaagtgggcaatgagtacgtcaccaaggggcagaatgtccagcaggtgatatatgccactggggcactggccaaggcagtgtatgagaggatgttcaactggatggtgacgcgcatcaatgccaccctggagaccaagcagccacgccagtacttcataggagtcctggacatcgctggcttcgagatcttcgatttcaacagctttgagcagctctgcatcaacttcaccaacgagaagctgcagcagttcttcaaccaccacatgtttgtgctggagcaggaggagtacaagaaggagggcatcgagtggacattcattgactttggcatggacctgcaggcctgcattgacctcatcgagaagcccatgggcatcatgtccatcctggaagaggagtgcatgttccccaaggccaccgacatgaccttcaaggccaagctgtttgacaaccacctgggcaaatccgccaacttccagaagccacgaaatatcaaggggaagcctgaagcccacttctccctgatccactatgccggcatcgtggactacaacatcattggctggctgcagaagaacaaggatcctctcaatgagactgtcgtgggcttgtatcagaagtcttccctcaagttgctcagcaccctgtttgccaactatgctggggctgatgcgcctattgagaagggcaaaggcaaggccaagaaaggctcgtcctttcagactgtgtcagctctgcacagggaaaatctgaacaagctgatgaccaacttgcgctccacccatccccactttgtacgttgtatcatccctaatgagacaaagtctccaggcgtgatggacaaccccctggtcatgcaccagctgcgctgcaatggtgtgctggagggcatccgcatctgcaggaaaggcttccccaaccgcatcctctacggggacttccggcagaggtatcgcatcctgaacccagcggccatccctgagggacagttcattgatagcaggaagggggcagagaagctgctcagctccctggacattgatcacaaccagtacaagtttggccacaccaaggtgttcttcaaggccgggctgctggggctgctggaggaaatgagggacgagaggctgagccgcatcatcacgcgtatccaggcccagtcccgaggtgtgctcgccagaatggagtacaaaaagctgctggaacgtagagactccctgctggtaatccagtggaacattcgggccttcatgggggtcaagaattggccctggatgaagctctacttcaagatcaagccgctgctgaagagtgcagaaagagagaaggagatggcctccatgaaggaggagttcacacgcctcaaagaggcgctagagaagtccgaggctcgccgcaaggagctggaggagaagatggtgtccctgctgcaggagaagaatgacctgcagctccaagtgcaggcggaacaagacaacctggcagatgctgaggagcgctgtgatcagctgatcaaaaacaagattcagctggaggctaaggtgaaggagatgaacgagaggctggaggatgaggaggagatgaatgctgagctcactgccaagaagcgcaagttggaagatgagtgctcagagctcaaaagggacatcgatgatctggagctgacactggccaaagtggagaaggagaaacacgcaacagagaacaaggtgaaaaacctgacagaggagatggctgggctggatgagatcattgccaagctgaccaaggagaagaaagctctgcaagaggcccaccaacaggctctggatgaccttcaggccgaggaggacaaggtcaacaccctgactaaggccaaagtcaagctggagcagcaagtggatgatctggaaggatccctggagcaagagaagaaggtgcgcatggacctggagcgagcgaagcggaagctggagggcgacctgaagctgacccaggagagcatcatggacctggagaatgacaagcagcagctggatgagcggctgaaaaaaaaagactttgagctgaatgctctcaacgcaaggattgaggatgaacaggccctcggcagccagctgcagaagaagctcaaggagcttcaggcacgcatcgaggagctggaggaggagctggaggccgagaagatggagctgcagtcagccctggaggaggccgaggcctccctggagcacgaggagggcaagatcctccgggcccagctggagttcaaccagatcaaggcagagatcgagcggaagctggcagagaaggacgaggagatggaacaggccaagcgcaaccacctgcgggtggtggactcgctgcagacctccctggacgcagagacacgcagccgcaacgaggccctgagggtgaagaagaagatggaaggagacctcaatgagatggagatccagctcagccacgccaaccgcatggccgccgaggcccagaagcaagtcaagagcctccagagcttgttgaaggacacccagattcagctggacgatgcagtccgtgccaacgacgacctgaaggagaacatcgccatcgtggagcggcgcaacaacctgctgcaggctgagctggaggagttgcgtgccgtggtggagcagacagagcggtcccggaagctggcggagcaggagctgattgagactagtgagcgggtgcagctgctgcattcccagaacaccagcctcatcaaccagaagaagaagatggatgctgacctgtcccagctccagactgaagtggaggaggcagtgcaggagtgcaggaatgctgaggagaaggccaagaaggccatcacggatgccgccatgatggcagaggagctgaagaaggagcaggacaccagcgcccacctggagcgcatgaagaagaacatggaacagaccattaaggacctgcagcaccggctggacgaagccgagcagatcgccctcaagggcggcaagaagcagctgcagaagctggaagcgcgggtgcgggagctggagaatgagctggaggccgagcagaagcgcaacgcagagtcggtgaagggcatgaggaagagcgagcggcgcatcaaggagctcacctaccagacggaggaggacaggaaaaacctgctgcggctgcaggacctggtagacaagctgcagctaaaggtcaaggcctacaagcgccaggccgaggaggcggaggagcaagccaacaccaacctgtccaagttccgcaaggtgcagcacgagctggatgaggcagaggagcgggcggacatcgccgagtcccaggtcaacaagctgcgggccaagagccgtgacattggcacgaagggcttgaatgaggagtagctttgccacatcttgatctgctcagccctggaggtgccagcaaagccccatgctggagcctgtgtaacagctccttgggaggaagcagaataaagcaattttccttgaagccga

SEQ ID NO: 18 - protein, 1524 aa, Homo sapiens
MGDSEMAVFGAAAPYLRKSEKERLEAQTRPFDLKKDVFVPDDKQEFVKAKIVSREGGKVTAETEYGKTVTVKEDQVMQQNPPKFDKIEDMAMLTFLHEPAVLYNLKDRYGSWMIYTYSGLFCVTVNPYKWLPVYTPEVVAAYRGKKRSEAPPHIFSISDNAYQYMLTDRENQSILITGESGAGKTVNTKRVIQYFAVIAAIGDRSKKDQSPGKGTLEDQIIQANPALEAFGNAKTVRNDNSSRFGKFIRIHFGATGKLASADIETYLLEKSRVIFQLKAERDYHIFYQILSNKKPELLDMLLITNNPYDYAFISQGETTVASIDDAEELMATDNAFDVLGFTSEEKNSMYKLTGAIMHFGNMKFKLKQREEQAEPDGTEEADKSAYLMGLNSADLLKGLCHPRVKVGNEYVTKGQNVQQVIYATGALAKAVYERMFNWMVTRINATLETKQPRQYFIGVLDIAGFEIFDFNSFEQLCINFTNEKLQQFFNHHMFVLEQEEYKKEGIEWTFIDFGMDLQACIDLIEKPMGIMSILEEECMFPKATDMTFKAKLFDNHLGKSANFQKPRNIKGKPEAHFSLIHYAGIVDYNIIGWLQKNKDPLNETVVGLYQKSSLKLLSTLFANYAGADAPIEKGKGKAKKGSSFQTVSALHRENLNKLMTNLRSTHPHFVRCIIPNETKSPGVMDNPLVMHQLRCNGVLEGIRICRKGFPNRILYGDFRQRYRILNPAAIPEGQFIDSRKGAEKLLSSLDIDHNQYKFGHTKVFFKAGLLGLLEEMRDERLSRIITRIQAQSRGVLARMEYKKLLERRDSLLVIQWNIRAFMGVKNWPWMKLYFKIKPLLKSAEREKEMASMKEEFTRLKEALEKSEARRKELEEKMVSLLQEKNDLQLQVQAEQDNLADAEERCDQLIKNKIQLEAKVKEMNERLEDEEEMNAELTAKKRKLEDECSELKRDIDDLELTLAKVEKEKHATENKVKNLTEEMAGLDEIIAKLTKEKKALQEAHQQALDDLQAEEDKVNTLTKAKVKLEQQVDDLEGSLEQEKKVRMDLERAKRKLEGDLKLTQESIMDLENDKQQLDERLKKKDFELNALNARIEDEQALGSQLQKKLKELQARIEELEEELEAEKMELQSALEEAEASLEHEEGKILRAQLEFNQIKAEIERKLAEKDEEMEQAKRNHLRVVDSLQTSLDAETRSRNEALRVKKKMEGDLNEMEIQLSHANRMAAEAQKQVKSLQSLLKDTQIQLDDAVRANDDLKENIAIVERRNNLLQAELEELRAVVEQTERSRKLAEQELIETSERVQLLHSQNTSLINQKKKMDADLSQLQTEVEEAVQECRNAEEKAKKAITDAAMMAEELKKEQDTSAHLERMKKNMEQTIKDLQHRLDEAEQIALKGGKKQLQKLEARVRELENELEAEQKRNAESVKGMRKSERRIKELTYQTEEDRKNLLRLQDLVDKLQLKVKAYKRQAEEAEEQANTNLSKFRKVQHELDEAEERADIAESQVNKLRAKSRDIGTKGLNEE

SEQ ID NO: 19 - DNA, 5780 bp, Homo sapiens
  CDS (87)..(5663)
tgtctttccctgctgctctcaggtcccctgcaggccttggcccctttcctcatctgtagacacacttgagtagcccaggcacagccatgggagattcggagatggcagtctttggggctgccgccccctacctgcgcaagtcagagaaggagcggctagaagcgcagaccaggccttttgacctcaagaaggatgtcttcgtgcctgatgacaaacaggagtttgtcaaggccaagatcgtgtctcgagagggtggcaaagtcactgccgagactgagtatggcaagacagtgaccgtgaaggaggaccaggtgatgcagcagaacccacccaagttcgacaaaatcgaggacatggccatgctgaccttcctgcatgagcccgcggtgctctacaacctcaaggatcgctacggctcctggatgatctacacctactcgggcctcttctgtgtcaccgtcaacccttacaagtggctgccggtgtacactcctgaggtggtggctgcctaccggggcaagaagaggagcgaggccccgccccacatcttctccatctccgacaacgcctatcagtacatgctgacagacagagaaaaccagtccatcctgatcaccggagaatccggagcagggaagacagtcaacaccaagagggtcatccagtactttgctgttattgcagccattggggaccgcagcaagaaggaccagagcccgggcaagggcaccctggaggaccagatcatccaggccaaccctgctctggaggcctttggcaatgccaagaccgtccggaacgacaactcctcccgcttcgggaaattcattcgaattcattttggggcaacaggaaagttggcatctgcagacatagagacctatcttctggaaaaatccagagttattttccagctgaaagcagagagagattatcacattttctaccaaatcctgtctaacaaaaagcctgagctgctggacatgctgctgatcaccaacaacccctacgattatgcattcatctcccaaggagagaccaccgtggcctccattgatgacgctgaggagctcatggccactgataacgcttttgatgtgctgggcttcacttcagaggagaaaaactccatgtataagctgacaggcgccatcatgcactttggaaacatgaagttcaagctgaagcagcgggaggagcaggcggagccagacggcactgaagaggctgacaagtctgcctacctcatggggctgaactcagccgacctgctcaaggggctgtgccaccctcgggtgaaagtgggcaatgagtacgtcaccaaggggcagaatgtccagcaggtgatatatgccactggggcactggccaaggcagtgtatgagaggatgttcaactggatggtgacgcgcatcaatgccaccctggagaccaagcagccacgccagtacttcataggagtcctggacatcgctggcttcgagatcttcgatttcaacagctttgagcagctctgcatcaacttcaccaacgagaagctgcagcagttcttcaaccaccacatgtttgtgctggagcaggaggagtacaagaaggagggcatcgagtggacattcattgactttggcatggacctgcaggcctgcattgacctcatcgagaagcccatgggcatcatgtccatcctggaagaggagtgcatgttccccaaggccaccgacatgaccttcaaggccaagctgtttgacaaccacctgggcaaatccgccaacttccagaagccacgaaatatcaaggggaagcctgaagcccacttctccctgatccactatgccggcatcgtggactacaacatcattggctggctgcagaagaacaaggatcctctcaatgagactgtcgtgggcttgtatcagaagtcttccctcaagttgctcagcaccctgtttgccaactatgctggggctgatgcgcctattgagaagggcaaaggcaaggccaagaaaggctcgtcctttcagactgtgtcagctctgcacagggaaaatctgaacaagctgatgaccaacttgcgctccacccatccccactttgtacgttgtatcatccctaatgagacaaagtctccaggcgtgatggacaaccccctggtcatgcaccagctgcgctgcaatggtgtgctggagggcatccgcatctgcaggaaaggcttccccaaccgcatcctctacggggacttccggcagaggtatcgcatcctgaacccagcggccatccctgagggacagttcattgatagcaggaagggggcagagaagctgctcagctccctggacattgatcacaaccagtacaagtttggccacaccaaggtgttcttcaaggccgggctgctggggctgctggaggaaatgagggacgagaggctgagccgcatcatcacgcgtatccaggcccagtcccgaggtgtgctcgccagaatggagtacaaaaagctgctggaacgtagagactccctgctggtaatccagtggaacattcgggccttcatgggggtcaagaattggccctggatgaagctctacttcaagatcaagccgctgctgaagagtgcagaaagagagaaggagatggcctccatgaaggaggagttcacacgcctcaaagaggcgctagagaagtccgaggctcgccgcaaggagctggaggagaagatggtgtccctgctgcaggagaagaatgacctgcagctccaagtgcaggcggaacaagacaacctggcagatgctgaggagcgctgtgatcagctgatcaaaaacaagattcagctggaggctaaggtgaaggagatgaacgagaggctggaggatgaggaggagatgaatgctgagctcactgccaagaagcgcaagttggaagatgagtgctcagagctcaaaagggacatcgatgatctggagctgacactggccaaagtggagaaggagaaacacgcaacagagaacaaggtgaaaaacctgacagaggagatggctgggctggatgagatcattgccaagctgaccaaggagaagaaagctctgcaagaggcccaccaacaggctctggatgaccttcaggccgaggaggacaaggtcaacaccctgactaaggccaaagtcaagctggagcagcaagtggatgatctggaaggatccctggagcaagagaagaaggtgcgcatggacctggagcgagcgaagcggaagctggagggcgacctgaagctgacccaggagagcatcatggacctggagaatgacaagcagcagctggatgagcggctgaaaaaaaaagactttgagctgaatgctctcaacgcaaggattgaggatgaacaggccctcggcagccagctgcagaagaagctcaaggagcttcaggcacgcatcgaggagctggaggaggagctggagtccgagcgcaccgccagggctaaggtggagaagctgcgctcagacctgtctcgggagctggaggagatcagcgagcggctggaagaggccggcggggccacgtccgtgcagatcgagatgaacaagaagcgcgaggccgagttccagaagatgcggcgggacctggaggaggccacgctgcagcacgaggccactgccgcggccctgcgcaagaagcacgccgacagcgtggccgagctgggcgagcagatcgacaacctgcagcgggtgaagcagaagctggagaaggagaagagcgagttcaagctggagctggatgacgtcacctccaacatggagcagatcatcaaggccaaggctaacctggagaagatgtgccggaccttggaagaccagatgaatgagcaccggagcaaggcggaggagacccagcgttctgtcaacgacctcaccagccagcgggccaagttgcaaaccgagaatggtgagctgtcccggcagctggatgagaaggaggcactgatctcccagctgacccgaggcaagctcacctacacccagcagctggaggacctcaagaggcagctggaggaggaggttaaggcgaagaacgccctggcccacgcactgcagtcggcccggcatgactgcgacctgctgcgggagcagtacgaggaggagacggaggccaaggccgagctgcagcgcgtcctttccaaggccaactcggaggtggcccagtggaggaccaagtatgagacggacgccattcagcggactgaggagctcgaggaggccaagaagaagctggcccagcggctgcaggaagctgaggaggccgtggaggctgttaatgccaagtgctcctcgctggagaagaccaagcaccggctacagaatgagatcgaggacttgatggtggacgtagagcgctccaatgctgctgctgcagccctggacaagaagcagaggaacttcgacaagatcctggccgagtggaagcagaagtatgaggagtcgcagtcggagctggagtcctcgcagaaggaggctcgctccctcagcacagagctcttcaaactcaagaacgcctatgaggagtccctggaacatctggagaccttcaagcgggagaacaaaaacctgcaggaggagatctccgacttgactgagcagttgggttccagcggaaagactatccatgagctggagaaggtccgaaagcagctggaggccgagaagatggagctgcagtcagccctggaggaggccgaggcctccctggagcacgaggagggcaagatcctccgggcccagctggagttcaaccagatcaaggcagagatcgagcggaagctggcagagaaggacgaggagatggaacaggccaagcgcaaccacctgcgggtggtggactcgctgcagacctccctggacgcagagacacgcagccgcaacgaggccctgagggtgaagaagaagcagacagagcggtcccggaagctggcggagcaggagctgattgagactagtgagcgggtgcagctgctgcattcccagaacaccagcctcatcaaccagaagaagaagatggatgctgacctgtcccagctccagactgaagtggaggaggcagtgcaggagtgcaggaatgctgaggagaaggccaagaaggccatcacggatgccgccatgatggcagaggagctgaagaaggagcaggacaccagcgcccacctggagcgcatgaagaagaacatggaacagaccattaaggacctgcagcaccggctggacgaagccgagcagatcgccctcaagggcggcaagaagcagctgcagaagctggaagcgcgggtgcgggagctggagaatgagctggaggccgagcagaagcgcaacgcagagtcggtgaagggcatgaggaagagcgagcggcgcatcaaggagctcacctaccagacggaggaggacaggaaaaacctgctgcggctgcaggacctggtagacaagctgcagctaaaggtcaaggcctacaagcgccaggccgaggaggcggaggagcaagccaacaccaacctgtccaagttccgcaaggtgcagcacgagctggatgaggcagaggagcgggcggacatcgccgagtcccaggtcaacaagctgcgggccaagagccgtgacattggcacgaagggcttgaatgaggagtagctttgccacatcttgatctgctcagccctggaggtgccagcaaagccccatgctggagcctgtgtaacagctccttgggaggaagcagaataaagcaattttccttgaagccga

SEQ ID NO: 20 - protein, 1859 aa, Homo sapiens
MGDSEMAVFGAAAPYLRKSEKERLEAQTRPFDLKKDVFVPDDKQEFVKAKIVSREGGKVTAETEYGKTVTVKEDQVMQQNPPKFDKIEDMAMLTFLHEPAVLYNLKDRYGSWMIYTYSGLFCVTVNPYKWLPVYTPEVVAAYRGKKRSEAPPHIFSISDNAYQYMLTDRENQSILITGESGAGKTVNTKRVIQYFAVIAAIGDRSKKDQSPGKGTLEDQIIQANPALEAFGNAKTVRNDNSSRFGKFIRIHFGATGKLASADIETYLLEKSRVIFQLKAERDYHIFYQILSNKKPELLDMLLITNNPYDYAFISQGETTVASIDDAEELMATDNAFDVLGFTSEEKNSMYKLTGAIMHFGNMKFKLKQREEQAEPDGTEEADKSAYLMGLNSADLLKGLCHPRVKVGNEYVTKGQNVQQVIYATGALAKAVYERMFNWMVTRINATLETKQPRQYFIGVLDIAGFEIFDFNSFEQLCINFTNEKLQQFFNHHMFVLEQEEYKKEGIEWTFIDFGMDLQACIDLIEKPMGIMSILEEECMFPKATDMTFKAKLFDNHLGKSANFQKPRNIKGKPEAHFSLIHYAGIVDYNIIGWLQKNKDPLNETVVGLYQKSSLKLLSTLFANYAGADAPIEKGKGKAKKGSSFQTVSALHRENLNKLMTNLRSTHPHFVRCIIPNETKSPGVMDNPLVMHQLRCNGVLEGIRICRKGFPNRILYGDFRQRYRILNPAAIPEGQFIDSRKGAEKLLSSLDIDHNQYKFGHTKVFFKAGLLGLLEEMRDERLSRIITRIQAQSRGVLARMEYKKLLERRDSLLVIQWNIRAFMGVKNWPWMKLYFKIKPLLKSAEREKEMASMKEEFTRLKEALEKSEARRKELEEKMVSLLQEKNDLQLQVQAEQDNLADAEERCDQLIKNKIQLEAKVKEMNERLEDEEEMNAELTAKKRKLEDECSELKRDIDDLELTLAKVEKEKHATENKVKNLTEEMAGLDEIIAKLTKEKKALQEAHQQALDDLQAEEDKVNTLTKAKVKLEQQVDDLEGSLEQEKKVRMDLERAKRKLEGDLKLTQESIMDLENDKQQLDERLKKKDFELNALNARIEDEQALGSQLQKKLKELQARIEELEEELESERTARAKVEKLRSDLSRELEEISERLEEAGGATSVQIEMNKKREAEFQKMRRDLEEATLQHEATAAALRKKHADSVAELGEQIDNLQRVKQKLEKEKSEFKLELDDVTSNMEQIIKAKANLEKMCRTLEDQMNEHRSKAEETQRSVNDLTSQRAKLQTENGELSRQLDEKEALISQLTRGKLTYTQQLEDLKRQLEEEVKAKNALAHALQSARHDCDLLREQYEEETEAKAELQRVLSKANSEVAQWRTKYETDAIQRTEELEEAKKKLAQRLQEAEEAVEAVNAKCSSLEKTKHRLQNEIEDLMVDVERSNAAAAALDKKQRNFDKILAEWKQKYEESQSELESSQKEARSLSTELFKLKNAYEESLEHLETFKRENKNLQEEISDLTEQLGSSGKTIHELEKVRKQLEAEKMELQSALEEAEASLEHEEGKILRAQLEFNQIKAEIERKLAEKDEEMEQAKRNHLRVVDSLQTSLDAETRSRNEALRVKKKQTERSRKLAEQELIETSERVQLLHSQNTSLINQKKKMDADLSQLQTEVEEAVQECRNAEEKAKKAITDAAMMAEELKKEQDTSAHLERMKKNMEQTIKDLQHRLDEAEQIALKGGKKQLQKLEARVRELENELEAEQKRNAESVKGMRKSERRIKELTYQTEEDRKNLLRLQDLVDKLQLKVKAYKRQAEEAEEQANTNLSKFRKVQHELDEAEERADIAESQVNKLRAKSRDIGTKGLNEE

SEQ ID NO: 21 - DNA, 6008 bp, Homo sapiens
  CDS (87)..(5891)
tgtctttccctgctgctctcaggtcccctgcaggccttggcccctttcctcatctgtagacacacttgagtagcccaggcacagccatgggagattcggagatggcagtctttggggctgccgccccctacctgcgcaagtcagagaaggagcggctagaagcgcagaccaggccttttgacctcaagaaggatgtcttcgtgcctgatgacaaacaggagtttgtcaaggccaagatcgtgtctcgagagggtggcaaagtcactgccgagactgagtatggcaagacagtgaccgtgaaggaggaccaggtgatgcagcagaacccacccaagttcgacaaaatcgaggacatggccatgctgaccttcctgcatgagcccgcggtgctctacaacctcaaggatcgctacggctcctggatgatctacacctactcgggcctcttctgtgtcaccgtcaacccttacaagtggctgccggtgtacactcctgaggtggtggctgcctaccggggcaagaagaggagcgaggccccgccccacatcttctccatctccgacaacgcctatcagtacatgctgacagacagagaaaaccagtccatcctgatcaccggagaatccggagcagggaagacagtcaacaccaagagggtcatccagtactttgctgttattgcagccattggggaccgcagcaagaaggaccagagcccgggcaagggcaccctggaggaccagatcatccaggccaaccctgctctggaggcctttggcaatgccaagaccgtccggaacgacaactcctcccgcttcgggaaattcattcgaattcattttggggcaacaggaaagttggcatctgcagacatagagacctatcttctggaaaaatccagagttattttccagctgaaagcagagagagattatcacattttctaccaaatcctgtctaacaaaaagcctgagctgctggacatgctgctgatcaccaacaacccctacgattatgcattcatctcccaaggagagaccaccgtggcctccattgatgacgctgaggagctcatggccactgataacgcttttgatgtgctgggcttcacttcagaggagaaaaactccatgtataagctgacaggcgccatcatgcactttggaaacatgaagttcaagctgaagcagcgggaggagcaggcggagccagacggcactgaagaggctgacaagtctgcctacctcatggggctgaactcagccgacctgctcaaggggctgtgccaccctcgggtgaaagtgggcaatgagtacgtcaccaaggggcagaatgtccagcaggtgatatatgccactggggcactggccaaggcagtgtatgagaggatgttcaactggatggtgacgcgcatcaatgccaccctggagaccaagcagccacgccagtacttcataggagtcctggacatcgctggcttcgagatcttcgatttcaacagctttgagcagctctgcatcaacttcaccaacgagaagctgcagcagttcttcaaccaccacatgtttgtgctggagcaggaggagtacaagaaggagggcatcgagtggacattcattgactttggcatggacctgcaggcctgcattgacctcatcgagaagcccatgggcatcatgtccatcctggaagaggagtgcatgttccccaaggccaccgacatgaccttcaaggccaagctgtttgacaaccacctgggcaaatccgccaacttccagaagccacgaaatatcaaggggaagcctgaagcccacttctccctgatccactatgccggcatcgtggactacaacatcattggctggctgcagaagaacaaggatcctctcaatgagactgtcgtgggcttgtatcagaagtcttccctcaagttgctcagcaccctgtttgccaactatgctggggctgatgcgcctattgagaagggcaaaggcaaggccaagaaaggctcgtcctttcagactgtgtcagctctgcacagggaaaatctgaacaagctgatgaccaacttgcgctccacccatccccactttgtacgttgtatcatccctaatgagacaaagtctccaggcgtgatggacaaccccctggtcatgcaccagctgcgctgcaatggtgtgctggagggcatccgcatctgcaggaaaggcttccccaaccgcatcctctacggggacttccggcagaggtatcgcatcctgaacccagcggccatccctgagggacagttcattgatagcaggaagggggcagagaagctgctcagctccctggacattgatcacaaccagtacaagtttggccacaccaaggtgttcttcaaggccgggctgctggggctgctggaggaaatgagggacgagaggctgagccgcatcatcacgcgtatccaggcccagtcccgaggtgtgctcgccagaatggagtacaaaaagctgctggaacgtagagactccctgctggtaatccagtggaacattcgggccttcatgggggtcaagaattggccctggatgaagctctacttcaagatcaagccgctgctgaagagtgcagaaagagagaaggagatggcctccatgaaggaggagttcacacgcctcaaagaggcgctagagaagtccgaggctcgccgcaaggagctggaggagaagatggtgtccctgctgcaggagaagaatgacctgcagctccaagtgcaggcggaacaagacaacctggcagatgctgaggagcgctgtgatcagctgatcaaaaacaagattcagctggaggctaaggtgaaggagatgaacgagaggctggaggatgaggaggagatgaatgctgagctcactgccaagaagcgcaagttggaagatgagtgctcagagctcaaaagggacatcgatgatctggagctgacactggccaaagtggagaaggagaaacacgcaacagagaacaaggtgaaaaacctgacagaggagatggctgggctggatgagatcattgccaagctgaccaaggagaagaaagctctgcaagaggcccaccaacaggctctggatgaccttcaggccgaggaggacaaggtcaacaccctgactaaggccaaagtcaagctggagcagcaagtggatgatctggaaggatccctggagcaagagaagaaggtgcgcatggacctggagcgagcgaagcggaagctggagggcgacctgaagctgacccaggagagcatcatggacctggagaatgacaagcagcagctggatgagcggctgaaaaaaaaagactttgagctgaatgctctcaacgcaaggattgaggatgaacaggccctcggcagccagctgcagaagaagctcaaggagcttcaggcacgcatcgaggagctggaggaggagctggagtccgagcgcaccgccagggctaaggtggagaagctgcgctcagacctgtctcgggagctggaggagatcagcgagcggctggaagaggccggcggggccacgtccgtgcagatcgagatgaacaagaagcgcgaggccgagttccagaagatgcggcgggacctggaggaggccacgctgcagcacgaggccactgccgcggccctgcgcaagaagcacgccgacagcgtggccgagctgggcgagcagatcgacaacctgcagcgggtgaagcagaagctggagaaggagaagagcgagttcaagctggagctggatgacgtcacctccaacatggagcagatcatcaaggccaaggctaacctggagaagatgtgccggaccttggaagaccagatgaatgagcaccggagcaaggcggaggagacccagcgttctgtcaacgacctcaccagccagcgggccaagttgcaaaccgagaatggtgagctgtcccggcagctggatgagaaggaggcactgatctcccagctgacccgaggcaagctcacctacacccagcagctggaggacctcaagaggcagctggaggaggaggttaaggcgaagaacgccctggcccacgcactgcagtcggcccggcatgactgcgacctgctgcgggagcagtacgaggaggagacggaggccaaggccgagctgcagcgcgtcctttccaaggccaactcggaggtggcccagtggaggaccaagtatgagacggacgccattcagcggactgaggagctcgaggaggccaagaagaagctggcccagcggctgcaggaagctgaggaggccgtggaggctgttaatgccaagtgctcctcgctggagaagaccaagcaccggctacagaatgagatcgaggacttgatggtggacgtagagcgctccaatgctgctgctgcagccctggacaagaagcagaggaacttcgacaagatcctggccgagtggaagcagaagtatgaggagtcgcagtcggagctggagtcctcgcagaaggaggctcgctccctcagcacagagctcttcaaactcaagaacgcctatgaggagtccctggaacatctggagaccttcaagcgggagaacaaaaacctgcaggaggagatctccgacttgactgagcagttgggttccagcggaaagactatccatgagctggagaaggtccgaaagcagctggaggccgagaagatggagctgcagtcagccctggaggaggccgaggcctccctggagcacgaggagggcaagatcctccgggcccagctggagttcaaccagatcaaggcagagatcgagcggaagctggcagagaaggacgaggagatggaacaggccaagcgcaaccacctgcgggtggtggactcgctgcagacctccctggacgcagagacacgcagccgcaacgaggccctgagggtgaagaagaagatggaaggagacctcaatgagatggagatccagctcagccacgccaaccgcatggccgccgaggcccagaagcaagtcaagagcctccagagcttgttgaaggacacccagattcagctggacgatgcagtccgtgccaacgacgacctgaaggagaacatcgccatcgtggagcggcgcaacaacctgctgcaggctgagctggaggagttgcgtgccgtggtggagcagacagagcggtcccggaagctggcggagcaggagctgattgagactagtgagcgggtgcagctgctgcattcccagaacaccagcctcatcaaccagaagaagaagatggatgctgacctgtcccagctccagactgaagtggaggaggcagtgcaggagtgcaggaatgctgaggagaaggccaagaaggccatcacggatgccgccatgatggcagaggagctgaagaaggagcaggacaccagcgcccacctggagcgcatgaagaagaacatggaacagaccattaaggacctgcagcaccggctggacgaagccgagcagatcgccctcaagggcggcaagaagcagctgcagaagctggaagcgcgggtgcgggagctggagaatgagctggaggccgagcagaagcgcaacgcagagtcggtgaagggcatgaggaagagcgagcggcgcatcaaggagctcacctaccagacggaggaggacaggaaaaacctgctgcggctgcaggacctggtagacaagctgcagctaaaggtcaaggcctacaagcgccaggccgaggaggcggaggagcaagccaacaccaacctgtccaagttccgcaaggtgcagcacgagctggatgaggcagaggagcgggcggacatcgccgagtcccaggtcaacaagctgcgggccaagagccgtgacattggcacgaagggcttgaatgaggagtagctttgccacatcttgatctgctcagccctggaggtgccagcaaagccccatgctggagcctgtgtaacagctccttgggaggaagcagaataaagcaattttccttgaagccga

SEQ ID NO: 22 - protein, 1935 aa, Homo sapiens
MGDSEMAVFGAAAPYLRKSEKERLEAQTRPFDLKKDVFVPDDKQEFVKAKIVSREGGKVTAETEYGKTVTVKEDQVMQQNPPKFDKIEDMAMLTFLHEPAVLYNLKDRYGSWMIYTYSGLFCVTVNPYKWLPVYTPEVVAAYRGKKRSEAPPHIFSISDNAYQYMLTDRENQSILITGESGAGKTVNTKRVIQYFAVIAAIGDRSKKDQSPGKGTLEDQIIQANPALEAFGNAKTVRNDNSSRFGKFIRIHFGATGKLASADIETYLLEKSRVIFQLKAERDYHIFYQILSNKKPELLDMLLITNNPYDYAFISQGETTVASIDDAEELMATDNAFDVLGFTSEEKNSMYKLTGAIMHFGNMKFKLKQREEQAEPDGTEEADKSAYLMGLNSADLLKGLCHPRVKVGNEYVTKGQNVQQVIYATGALAKAVYERMFNWMVTRINATLETKQPRQYFIGVLDIAGFEIFDFNSFEQLCINFTNEKLQQFFNHHMFVLEQEEYKKEGIEWTFIDFGMDLQACIDLIEKPMGIMSILEEECMFPKATDMTFKAKLFDNHLGKSANFQKPRNIKGKPEAHFSLIHYAGIVDYNIIGWLQKNKDPLNETVVGLYQKSSLKLLSTLFANYAGADAPIEKGKGKAKKGSSFQTVSALHRENLNKLMTNLRSTHPHFVRCIIPNETKSPGVMDNPLVMHQLRCNGVLEGIRICRKGFPNRILYGDFRQRYRILNPAAIPEGQFIDSRKGAEKLLSSLDIDHNQYKFGHTKVFFKAGLLGLLEEMRDERLSRIITRIQAQSRGVLARMEYKKLLERRDSLLVIQWNIRAFMGVKNWPWMKLYFKIKPLLKSAEREKEMASMKEEFTRLKEALEKSEARRKELEEKMVSLLQEKNDLQLQVQAEQDNLADAEERCDQLIKNKIQLEAKVKEMNERLEDEEEMNAELTAKKRKLEDECSELKRDIDDLELTLAKVEKEKHATENKVKNLTEEMAGLDEIIAKLTKEKKALQEAHQQALDDLQAEEDKVNTLTKAKVKLEQQVDDLEGSLEQEKKVRMDLERAKRKLEGDLKLTQESIMDLENDKQQLDERLKKKDFELNALNARIEDEQALGSQLQKKLKELQARIEELEEELESERTARAKVEKLRSDLSRELEEISERLEEAGGATSVQIEMNKKREAEFQKMRRDLEEATLQHEATAAALRKKHADSVAELGEQIDNLQRVKQKLEKEKSEFKLELDDVTSNMEQIIKAKANLEKMCRTLEDQMNEHRSKAEETQRSVNDLTSQRAKLQTENGELSRQLDEKEALISQLTRGKLTYTQQLEDLKRQLEEEVKAKNALAHALQSARHDCDLLREQYEEETEAKAELQRVLSKANSEVAQWRTKYETDAIQRTEELEEAKKKLAQRLQEAEEAVEAVNAKCSSLEKTKHRLQNEIEDLMVDVERSNAAAAALDKKQRNFDKILAEWKQKYEESQSELESSQKEARSLSTELFKLKNAYEESLEHLETFKRENKNLQEEISDLTEQLGSSGKTIHELEKVRKQLEAEKMELQSALEEAEASLEHEEGKILRAQLEFNQIKAEIERKLAEKDEEMEQAKRNHLRVVDSLQTSLDAETRSRNEALRVKKKMEGDLNEMEIQLSHANRMAAEAQKQVKSLQSLLKDTQIQLDDAVRANDDLKENIAIVERRNNLLQAELEELRAVVEQTERSRKLAEQELIETSERVQLLHSQNTSLINQKKKMDADLSQLQTEVEEAVQECRNAEEKAKKAITDAAMMAEELKKEQDTSAHLERMKKNMEQTIKDLQHRLDEAEQIALKGGKKQLQKLEARVRELENELEAEQKRNAESVKGMRKSERRIKELTYQTEEDRKNLLRLQDLVDKLQLKVKAYKRQAEEAEEQANTNLSKFRKVQHELDEAEERADIAESQVNKLRAKSRDIGTKGLNEE

SEQ ID NO: 23 - DNA, 3657 bp, Homo sapiens
  CDS (29)..(3061)
gagtcccagccccacgccggctaccaccatggcggagaccaacaacgaatgtagcatcaaggtgctctgccgattccggcccctgaaccaggctgagattctgcggggagacaagttcatccccattttccaaggggacgacagcgtcgttattggggggaagccatatgtttttgaccgtgtattccccccaaacacgactcaagagcaagtttatcatgcatgtgccatgcagattgtcaaagatgtccttgctggctacaatggcaccatttttgcttatggacagacatcctcagggaaaacacataccatggagggaaagctgcacgaccctcagctgatgggaatcattcctcgaattgcccgagacatcttcaaccacatctactccatggatgagaaccttgagttccacatcaaggtttcttactttgaaatttacctggacaaaattcgtgaccttctggatgtgaccaagacaaatctgtccgtgcacgaggacaagaaccgggtgccatttgtcaagggttgtactgaacgctttgtgtccagcccggaggagattctggatgtgattgatgaagggaaatcaaatcgtcatgtggctgtcaccaacatgaatgaacacagctctcggagccacagcatcttcctcatcaacatcaagcaggagaacatggaaacggagcagaagctcagtgggaagctgtatctggtggacctggcagggagtgagaaggtcagcaagactggagcagagggagccgtgctggacgaggcaaagaatatcaacaagtcactgtcagctctgggcaatgtgatctccgcactggctgagggcactaaaagctatgttccatatcgtgacagcaaaatgacaaggattctccaggactctctcgggggaaactgccggacgactatgttcatctgttgctcaccatccagttataatgatgcagagaccaagtccaccctgatgtttgggcagcgggcaaagaccattaagaacactgcctcagtaaatttggagttgactgctgagcagtggaagaagaaatatgagaaggagaaggagaagacaaaggcccagaaggagacgattgcgaagctggaggctgagctgagccggtggcgcaatggagagaatgtgcctgagacagagcgcctggctggggaggaggcagccctgggagccgagctctgtgaggagacccctgtgaatgacaactcatccatcgtggtgcgcatcgcgcccgaggagcggcagaaatacgaggaggagatccgccgtctctataagcagcttgacgacaaggatgatgaaatcaaccaacaaagccaactcatagagaagctcaagcagcaaatgctggaccaggaagagctgctggtgtccacccgaggagacaacgagaaggtccagcgggagctgagccacctgcaatcagagaacgatgccgctaaggatgaggtgaaggaagtgctgcaggccctggaggagctggctgtgaactatgaccagaagtcccaggaggtggaggagaagagccagcagaaccagcttctggtggatgagctgtctcagaaggtggccaccatgctgtccctggagtctgagttgcagcggctacaggaggtcagtggacaccagcgaaaacgaattgctgaggtgctgaacgggctgatgaaggatctgagcgagttcagtgtcattgtgggcaacggggagattaagctgccagtggagatcagtggggccatcgaggaggagttcactgtggcccgactctacatcagcaaaatcaaatcagaagtcaagtctgtggtcaagcggtgccggcagctggagaacctccaggtggagtgtcaccgcaagatggaagtgaccgggcgggagctctcatcctgccagctcctcatctctcagcatgaggccaagatccgctcgcttacggaatacatgcagagcgtggagctaaagaagcggcacctggaagagtcctatgactccttgagcgatgagctggccaagctccaggcccaggaaactgtgcatgaagtggccctgaaggacaaggagcctgacactcaggatgcagatgaagtgaagaaggctctggagctgcagatggagagtcaccgggaggcccatcaccggcagctggcccggctccgggacgagatcaacgagaagcagaagaccattgatgagctcaaagacctaaatcagaagctccagttagagctagagaagcttcaggctgactacgagaagctgaagagcgaagaacacgagaagagcaccaagctgcaggagctgacatttctgtacgagcgacatgagcagtccaagcaggacctcaagggtctggaggagacagttgcccgggaactccagaccctccacaaccttcgcaagctgttcgttcaagacgtcacgactcgagtcaagaaaagtgcagaaatggagcccgaagacagtggggggattcactcccaaaagcagaagatttcctttcttgagaacaacctggaacagcttacaaaggttcacaaacagctggtacgtgacaatgcagatctgcgttgtgagcttcctaaattggaaaaacgacttagggctacggctgagagagttaaggccctggagggtgcactgaaggaggccgttcgctacaagagctcgggcaaacggggccattctgcccagattgccaaacccgtccggcctggccactacccagcatcctcacccaccaacccctatggcacccggagccctgagtgcatcagttacaccaacagcctcttccagaactaccagaatctctacctgcaggccacacccagctccacctcagatatgtactttgcaaactcctgtaccagcagtggagccacatcttctggcggccccttggcttcctaccagaaggccaacatggacaatggaaatgccacagatatcaatgacaataggagtgacctgccgtgtggctatgaggctgaggaccaggccaagcttttccctctccaccaagagacagcagccagctaatctcccacacccacggctgcatacctgcactttcagtttctaagagggactgaggcctcttctcagcatgctgcaaacctgtggtctctgatactaactccctccccaacccctgttgttggactgtactatgtttgatgtcttctcttacttactctgtatctctttgtactctgtatctatatatcaaaagctgctgctatgtctctcttctgtcttattctcaagtatctactgatgtatttagcaatttcaaagcatagtctaccttccttatttggggcaatagggaggagggtgaatgtttcttctttctcatctactcgtctcacactgagtggtgttagtcactgagtagaggtcacagagatgacaaaaggaaaaatgggagctagagggttgtgacccttcatacacacacgcacacacgcacacaaacatgcacacacgcatgcacacacacaaagccttaagcagaagaatgtcttagcatcatgagacgagaaatagactcttcctccctcctctttcacatatagcacagaaggtaaaatggaagggctgctaattgagacatataattttcggaattc

SEQ ID NO: 24 - protein, 1011 aa, Homo sapiens
MAETNNECSIKVLCRFRPLNQAEILRGDKFIPIFQGDDSVVIGGKPYVFDRVFPPNTTQEQVYHACAMQIVKDVLAGYNGTIFAYGQTSSGKTHTMEGKLHDPQLMGIIPRIARDIFNHIYSMDENLEFHIKVSYFEIYLDKIRDLLDVTKTNLSVHEDKNRVPFVKGCTERFVSSPEEILDVIDEGKSNRHVAVTNMNEHSSRSHSIFLINIKQENMETEQKLSGKLYLVDLAGSEKVSKTGAEGAVLDEAKNINKSLSALGNVISALAEGTKSYVPYRDSKMTRILQDSLGGNCRTTMFICCSPSSYNDAETKSTLMFGQRAKTIKNTASVNLELTAEQWKKKYEKEKEKTKAQKETIAKLEAELSRWRNGENVPETERLAGEEAALGAELCEETPVNDNSSIVVRIAPEERQKYEEEIRRLYKQLDDKDDEINQQSQLIEKLKQQMLDQEELLVSTRGDNEKVQRELSHLQSENDAAKDEVKEVLQALEELAVNYDQKSQEVEEKSQQNQLLVDELSQKVATMLSLESELQRLQEVSGHQRKRIAEVLNGLMKDLSEFSVIVGNGEIKLPVEISGAIEEEFTVARLYISKIKSEVKSVVKRCRQLENLQVECHRKMEVTGRELSSCQLLISQHEAKIRSLTEYMQSVELKKRHLEESYDSLSDELAKLQAQETVHEVALKDKEPDTQDADEVKKALELQMESHREAHHRQLARLRDEINEKQKTIDELKDLNQKLQLELEKLQADYEKLKSEEHEKSTKLQELTFLYERHEQSKQDLKGLEETVARELQTLHNLRKLFVQDVTTRVKKSAEMEPEDSGGIHSQKQKISFLENNLEQLTKVHKQLVRDNADLRCELPKLEKRLRATAERVKALEGALKEAVRYKSSGKRGHSAQIAKPVRPGHYPASSPTNPYGTRSPECISYTNSLFQNYQNLYLQATPSSTSDMYFANSCTSSGATSSGGPLASYQKANMDNGNATDINDNRSDLPCGYEAEDQAKLFPLHQETAAS

SEQ ID NO: 25 - DNA, 3515 bp, Homo sapiens
  CDS (128)..(3415)
aaaggggagtccggtgaacgggcagaagcagggccatgcccaagccacccccaagatccccctgaacctgcacctccatcacgacccattcaggagcctccaggagcccagacaccagccccccaccatgggcagcaaggagcgcttccactggcagagccacaacgtgaagcagagcggcgtggatgacatggtgcttcttccccagatcaccgaagacgccattgccgccaacctccggaagcgcttcatggacgactacatcttcacctacatcggctctgtgctcatctctgtaaaccccttcaagcagatgccctacttcaccgaccgtgagatcgacctctatcagggcgcggtgcagtatgagaatcccccgcacatctacgccctcacggacaacatgtaccggaacatgcttatcgactgtgagaaccagtgtgtcatcattagtggagagagtggagctgggaagacagtggcagccaaatatatcatgggctacatctccaaggtgtctggcggaggcgagaaggtccagcacgtcaaagatatcatcctgcagtccaacccgctgctcgaggccttcggcaacgccaagactgtgcgcaacaacaattccagccgctttggcaagtactttgagatccagttcagccgaggtggggagccagatgggggcaagatctccaacttcttgctggagaagtcccgcgtggtcatgcaaaatgaaaatgagaggaacttccacatctactaccagctgctggaaggggcctcccaggagcaaaggcagaacctgggcctcatgacaccggactactattactacctcaaccaatcggacacctaccaggtggacggcacggacgacagaagcgactttggtgagactctgagtgctatgcaggttattgggatcccgcccagcatccagcagctggtcctgcagctcgtggcggggatcttgcacctggggaacatcagtttctgtgaagacgggaattacgcccgagtggagagtgtggacctggcctttcccgcctacctgctgggcattgacagcgggcgactgcaggagaagctgaccagccgcaagatggacagccgctggggcgggcgcagcgagtccatcaatgtgaccctcaacgtggagcaggcagcctacacccgtgatgccctggccaaggggctctatgcccgcctcttcgacttcctcgtggaggcgatcaaccgtgctatgcagaaaccccaggaagagtacagcatcggtgtgctggacatttacggcttcgagatcttccagaaaaatggcttcgagcagttttgcatcaacttcgtcaatgagaagctgcagcaaatctttatcgaacttaccctgaaggccgagcaggaggagtatgtgcaggaaggcatccgctggactccaatccagtacttcaacaacaaggtcgtctgtgacctcatcgaaaacaagctgagccccccaggcatcatgagcgtcttggacgacgtgtgcgccaccatgcacgccacgggcgggggagcagaccagacactgctgcagaagctgcaggcggctgtggggacccacgagcatttcaacagctggagcgccggcttcgtcatccaccactacgctggcaaggtgtcctacgacgtcagcggcttctgcgagaggaaccgagacgttctcttctccgacctcatagagctgatgcagaccagtgagcagttcctccggatgctcttccccgagaagctggatggagacaagaaggggcgccccagcaccgccggctccaagatcaagaaacaagccaacgacctggtggccacactgatgaggtgcacaccccactacatccgctgcatcaaacccaacgagaccaagaggccccgagactgggaggagaacagggtcaagcaccaggtggaatacctgggcctgaaggagaacatcagggtgcgcagagccggcttcgcctaccgccgccagttcgccaaattcctgcagaggtatgccattctgacccccgagacgtggccgcggtggcgtggggacgaacgccagggcgtccagcacctgcttcgggcggtcaacatggagcccgaccagtaccagatggggagcaccaaggtctttgtcaagaacccagagtcgcttttcctcctggaggaggtgcgagagcgaaagttcgatggctttgcccgaaccatccagaaggcctggcggcgccacgtggctgtccggaagtacgaggagatgcgggaggaagcttccaacatcctgctgaacaagaaggagcggaggcgcaacagcatcaatcggaacttcgtcggggactacctggggctggaggagcggcccgagctgcgtcagttcctgggcaagagggagcgggtggacttcgccgattcggtcaccaagtacgaccgccgcttcaagcccatcaagcgggacttgatcctgacgcccaagtgtgtgtatgtgattgggcgagagaaagtgaagaagggacctgagaagggccaggtgtgtgaagtcttgaagaagaaagtggacatccaggctctgcggggagtctccctcagcacgcgacaggacgacttcttcatcctccaagaggatgccgccgacagcttcctggagagcgtcttcaagaccgagtttgtcagccttctgtgcaagcgcttcgaggaggcgacgcggaggcccctgcccctcaccttcagcgacagactacagtttcgggtgaagaaggagggctggggcggtggcggcacccgcagcgtcaccttctcccgcggcttcggcgacttggcagtgctcaaggttggcggtcggaccctcacggtcagcgtgggcgatgggctgcccaagagctcagagcctacgcggaagggaatggccaagggaaaacctcggaggtcgtcccaagcccctacccgggcggcccctgcgccccccagaggtatggatcgcaatggggtgcccccctctgccagagggggccccctgcccctggagatcatgtctggagggggcacccacaggcctccccggggccctccgtccacatccctgggagccagcagacgaccccgggcacgtccgccctcagagcacaacacagaattcctcaacgtgcctgaccagggcatggccgggatgcagaggaagcgcagcgtggggcaacggccagtgcctggtgtgggccgacccaagccccagcctcggacacatggtcccaggtgccgggccctataccagtacgtgggccaagatgtggacgagctgagcttcaacgtgaacgaggtcattgagatcctcatggaagatccctcgggctggtggaagggccggcttcacggccaggagggccttttcccaggaaactacgtggagaagatctgagctgggccctgggatactgccttctctttcgcccgcctatctgcctgccggcctggtggggagccaggccctgccaatgagagcctcgtttacctgg

SEQ ID NO: 26 - protein, 1096 aa, Homo sapiens
MGSKERFHWQSHNVKQSGVDDMVLLPQITEDAIAANLRKRFMDDYIFTYIGSVLISVNPFKQMPYFTDREIDLYQGAVQYENPPHIYALTDNMYRNMLIDCENQCVIISGESGAGKTVAAKYIMGYISKVSGGGEKVQHVKDIILQSNPLLEAFGNAKTVRNNNSSRFGKYFEIQFSRGGEPDGGKISNFLLEKSRVVMQNENERNFHIYYQLLEGASQEQRQNLGLMTPDYYYYLNQSDTYQVDGTDDRSDFGETLSAMQVIGIPPSIQQLVLQLVAGILHLGNISFCEDGNYARVESVDLAFPAYLLGIDSGRLQEKLTSRKMDSRWGGRSESINVTLNVEQAAYTRDALAKGLYARLFDFLVEAINRAMQKPQEEYSIGVLDIYGFEIFQKNGFEQFCINFVNEKLQQIFIELTLKAEQEEYVQEGIRWTPIQYFNNKVVCDLIENKLSPPGIMSVLDDVCATMHATGGGADQTLLQKLQAAVGTHEHFNSWSAGFVIHHYAGKVSYDVSGFCERNRDVLFSDLIELMQTSEQFLRMLFPEKLDGDKKGRPSTAGSKIKKQANDLVATLMRCTPHYIRCIKPNETKRPRDWEENRVKHQVEYLGLKENIRVRRAGFAYRRQFAKFLQRYAILTPETWPRWRGDERQGVQHLLRAVNMEPDQYQMGSTKVFVKNPESLFLLEEVRERKFDGFARTIQKAWRRHVAVRKYEEMREEASNILLNKKERRRNSINRNFVGDYLGLEERPELRQFLGKRERVDFADSVTKYDRRFKPIKRDLILTPKCVYVIGREKVKKGPEKGQVCEVLKKKVDIQALRGVSLSTRQDDFFILQEDAADSFLESVFKTEFVSLLCKRFEEATRRPLPLTFSDRLQFRVKKEGWGGGGTRSVTFSRGFGDLAVLKVGGRTLTVSVGDGLPKSSEPTRKGMAKGKPRRSSQAPTRAAPAPPRGMDRNGVPPSARGGPLPLEIMSGGGTHRPPRGPPSTSLGASRRPRARPPSEHNTEFLNVPDQGMAGMQRKRSVGQRPVPGVGRPKPQPRTHGPRCRALYQYVGQDVDELSFNVNEVIEILMEDPSGWWKGRLHGQEGLFPGNYVEKI

SEQ ID NO: 27 - DNA, 1520 bp, Homo sapiens
  CDS (412)..(1167)
tcaccggcgccgagatgcggttccggcgcttagggcgccgctaaactcagagcccgggagtcatggctgcgggcggtgccgccccaggtaaatcagtccaggagcagggcccgggcctggcgtacactctcggaaaaatgggggccagagcaaacaagaagagcgaaagcaagagggctaggcagccagaggcggcagcaagactcaagacgccaacggcgccgtcttcctggggccccagggcctgcgccatccctgggctgccggggcaccgcctctccacgcccctcgtccggcggcggctgcgactgcttccgaggtcatgttcccaggacgggcgcgtcttcagggtggaagcctggcgcacgtccggaggtgccgaggacccaaccagcccaaactctgggggaaatgactcccctctgccctcgccccgcgctctgctaccatttccttacgtctctgcttcgctcagcgatgcaaaacgcgcgaggcgcacggcagagggccgaagccgcggtactctccgggccaggcccgcccctcggccgcgccgcgcagcacgggattccccggccgctgtccagcgctggccgcctgagccaaggctgccgcggagccagtacagtcggggccgctggctggaagggcgagcttcctaaggcggggggaagcccggcgccggggccggagacacccgccatttcacccagtaagcgggcccggcctgcggaggtgggcggcatgcagctccgctttgcccggctctccgagcacgccacggcccccacccggggctccgcgcgcgccgcgggctacgacctgtacagtgcctatgattacacaataccacctatggagaaagctgttgtgaaaacggacattcagatagcgctcccttctgggtgttatggaagagtggctccacggtcaggcttggctgcaaaacactttattgatgtaggagctggtgtcatagatgaagattatagaggaaatgttggtgttgtactgtttaattttggcaaagaaaagtttgaagtcaaaaaaggtgatcgaattgcacagctcatttgcgaacggattttttatccagaaatagaagaagttcaagccttggatgacaccgaaaggggttcaggaggttttggttccactggaaagaattaaaatttatgccaagaacagaaaacaagaagtcatacctttttcttaaaaaaaaaaaaaaagtttttgcttcaagtgttttggtgttttgcacttctgtaaacttactagctttaccttctaaaagtactgcattttttacttttttttatgatcaaggaaaagatcattaaaaaaaaacacaaagaagtttttctttgtgtttggatcaaaaagaaactttgtttttccgcaattgaaggttgtatgtaaatctgctttgtggtgacctgatgtaaacagtgtcttcttaaaatcaaatgtaaatcaattcccgattaaaaaaaaaagcctgtatttaactcaaaaaaaaa

SEQ ID NO: 28 - protein, 252 aa, Homo sapiens
MTPLCPRPALCYHFLTSLLRSAMQNARGARQRAEAAVLSGPGPPLGRAAQHGIPRPLSSAGRLSQGCRGASTVGAAGWKGELPKAGGSPAPGPETPAISPSKRARPAEVGGMQLRFARLSEHATAPTRGSARAAGYDLYSAYDYTIPPMEKAVVKTDIQIALPSGCYGRVAPRSGLAAKHFIDVGAGVIDEDYRGNVGVVLFNFGKEKFEVKKGDRIAQLICERIFYPEIEEVQALDDTERGSGGFGSTGKN

SEQ ID NO: 29 - DNA, 916 bp, Homo sapiens
  CDS (88)..(774)
gttcccaggacgggcgcgtcttcagggtggaagcctggcgcacgtccggaggtgccgaggacccaaccagcccaaactctgggagaaatgactcccctctgccctcgccccgcgctctgctaccatttccttacgtctctgcttcgctcagcgatgcaaaacgcgcgaggcgcacggcagagggccgaagccgcggtactctccgggccaggcccgcccctcggccgcgccgcgcagcacgggattccccggccgctgtccagcgctggccgcctgagccaaggctgccgcggagccaagacacccgccatttcacccagtaagcgggcccggcctgcggaggtgggcggcatgcagctccgctttgcccggctctccgagcacgccacggcccccacccggggctccgcgcgcgccgcgggctacgacctgtacagtgcctatgattacacaataccacctatggagaaagctgttgtgaaaacggacattcagatagcgctcccttctgggtgttatggaagagtggctccacggtcaggcttggctgcaaaacactttattgatgtaggagctggtgtcatagatgaagattatagaggaaatgttggtgttgtactgtttaattttggcaaagaaaagtttgaagtcaaaaaaggtgatcgaattgcacagctcatttgcgaacggattttttatccagaaatagaagaagttcaagccttggatgacaccgaaaggggttcaggaggttttggttccactggaaagaattaaaatttatgccaagaacagaaaacaagaagtcatacctttttcttaaaaaaaaaaaaagtttttgcttcaagtgttttggtgttttgcacttctgtaaacttactagctttaccttctaaaagtactgcattttttactt

SEQ ID NO: 30 - protein, 229 aa, Homo sapiens
MTPLCPRPALCYHFLTSLLRSAMQNARGARQRAEAAVLSGPGPPLGRAAQHGIPRPLSSAGRLSQGCRGAKTPAISPSKRARPAEVGGMQLRFARLSEHATAPTRGSARAAGYDLYSAYDYTIPPMEKAVVKTDIQIALPSGCYGRVAPRSGLAAKHFIDVGAGVIDEDYRGNVGVVLFNFGKEKFEVKKGDRIAQLICERIFYPEIEEVQALDDTERGSGGFGSTGKN

SEQ ID NO: 31 - DNA, 1816 bp, Homo sapiens
  CDS (20)..(511)
ctcgccttctggctctgccatgccctgctctgaagagacacccgccatttcacccagtaagcgggcccggcctgcggaggtgggcggcatgcagctccgctttgcccggctctccgagcacgccacggcccccacccggggctccgcgcgcgccgcgggctacgacctgtacagtgcctatgattacacaataccacctatggagaaagctgttgtgaaaacggacattcagatagcgctcccttctgggtgttatggaagagtggctccacggtcaggcttggctgcaaaacactttattgatgtaggagctggtgtcatagatgaagattatagaggaaatgttggtgttgtactgtttaattttggcaaagaaaagtttgaagtcaaaaaaggtgatcgaattgcacagctcatttgcgaacggattttttatccagaaatagaagaagttcaagccttggatgacaccgaaaggggttcaggaggttttggttccactggaaagaattaaaatttatgccaagaacagaaaacaagaagtcatacctttttcttaaaaaaaaaaaaaaagtttttgcttcaagtgttttggtgttttgcacttctgtaaacttactagctttaccttctaaaagtactgcattttttacttttttttatgatcaaggaaaagatcgttaaaaaaaaacacaaagaagtttttctttgtgtttggatcaaaaagaaactttgtttttccgcaattgaaggttgtatgtaaatctgctttgtggtgacctgatgtaaacagtgtcttcttaaaatcaaatgtaaatcaattacagattaaaaaaaaaagcctgtatttaactcatatgatctcccttcagcaacttattttgctttaattgctttaaatcttaagcaatattttttattcagtaaacaaattctttcacaaggtacaaaatcttgcataagctgaactaaaataaaaatgaaaaggagagattaaaggtattccttgttcttcccttctcttcactagtctaaaaacttctttttaatcttaagattctttgtgatgagggtgagaaaaagaatcctcagtttatttttccactattaatctttcttttgataaatcctctattgactgggtagaggtatgtttgtgaaagacatgtaacttggggatttgttactttaggtttgttcccttgaatttcatctcatcaggcaaattgtactagttgtagttacgagttttccctcagtgaagtagcaataggctgtaatcaagaaaatatgccatttatagagataagataaatgaaataatacttcagccaccaggtttttctgtctcacatacataagcagcatttcattgcagatatgggactgattctgtggcttaccttgattaacatcttttggaagttttgctagtgtgctttcctttctttactatgtttctcagattcctttgtatcagggttttgggtgtcacttaggttttgtccatcagattctgtgagacaccaggcatcgttttgaggatgtgggttatacacatggagtgcttctggaactatcagcccacttgaccacccagtttgtggaagcacaggcaagagtgttcttttctggtgattctccaggccatttaataccctgcaatgtaattgtccctctgtggctcacatttcattagtgagccatgaaatcaactcagtgggacatagccagcatttttgcataccaggttgggctataaaatatttctgttgtcaataaattttaaatgttttcctgctaaaaaaaaaaaaaa

SEQ ID NO: 32 - protein, 164 aa, Homo sapiens
MPCSEETPAISPSKRARPAEVGGMQLRFARLSEHATAPTRGSARAAGYDLYSAYDYTIPPMEKAVVKTDIQIALPSGCYGRVAPRSGLAAKHFIDVGAGVIDEDYRGNVGVVLFNFGKEKFEVKKGDRIAQLICERIFYPEIEEVQALDDTERGSGGFGSTGKN

SEQ ID NO: 33 - DNA, 960 bp, Homo sapiens
  CDS (197)..(745)
gtgagttggctgccggtgagttgggtgccggtggagtcgtgttggtcctcagaatccccgcgtagccgctgcctcctcctaccctcgccatgtttcttacccggtctgagtacgacagcttggttctacagccattgggatccagacatcagagggtgtgtgcctagctgtggagaagagaattacttccccactgatggagcccagcagcattgagaaaattgtagagattgatgctcacataggttgtgccatgagtgggctaattgctgatgctaagactttaattgataaagccagagtggagacacagaaccactggttcacctacaatgagacaatgacagtggagagtgtgacccaagctgtgtccaatctggctttgcagtttggagaagaagatgcagatccaggtgccatgtctcgtccctttggagtagcattattatttggaggagttgatgagaaaggaccccagctgtttcatatggacccatctgggacctttgtacagtgtgatgctcgagcaattggctctgcttcagagggtgcccagagctccttgcaagaactttaccacaagtctatgactttgaaagaagccatcaagtcttcactcatcatcctcaaacaagtaatggaggagaagctgaatgcaacaaacattgagctagccacagtgcagcctggccagaatttccacatgttcacaaaggaagaacttgaagaggttatcaaggacatttaaggaatcctgatcctcagaacttctctgggacaatttcagttctaataatgtccttaaattttatttccagctcctgttccttggaaaatctccattgtatgtgcattttttaaatgatgtctgtacataaaggcagttctgaaataaagaaaattttaaaataaaaaaaaaaaaaaaaaaaaaaaaaaaaaaaaaaaaaaaaaaaaaaaaaa

SEQ ID NO: 34 - protein, 183 aa, Homo sapiens
MEPSSIEKIVEIDAHIGCAMSGLIADAKTLIDKARVETQNHWFTYNETMTVESVTQAVSNLALQFGEEDADPGAMSRPFGVALLFGGVDEKGPQLFHMDPSGTFVQCDARAIGSASEGAQSSLQELYHKSMTLKEAIKSSLIILKQVMEEKLNATNIELATVQPGQNFHMFTKEELEEVIKDI

SEQ ID NO: 35 - DNA, 959 bp, Homo sapiens
  CDS (22)..(744)
ctgcctcctcctaccctcgccatgtttcttacccggtctgagtacgacaggggcgtgaatactttttctcccgaaggaagattatttcaagtggaatatgacattgaggctatcaagcttggttctacagccattgggatccagacatcagagggtgtgtgcctagctgtggagaagagaattacttccccactgatggagcccagcagcattgagaaaattgtagagattgatgctcacataggttgtgccatgagtgggctaattgctgatgctaagactttaattgataaagccagagtggagacacagaaccactggttcacctacaatgagacaatgacagtggagagtgtgacccaagctgtgtccaatctggctttgcagtttggagaagaagatgcagatccaggtgccatgtctcgtccctttggagtagcattattatttggaggagttgatgagaaaggaccccagctgtttcatatggacccatctgggacctttgtacagtgtgatgctcgagcaattggctctgcttcagagggtgcccagagctccttgcaagaactttaccacaagtctatgactttgaaagaagccatcaagtcttcactcatcatcctcaaacaagtaatggaggagaagctgaatgcaacaaacattgagctagccacagtgcagcctggccagaatttccacatgttcacaaaggaagaacttgaagaggttatcaaggacatttaaggaatcctgatcctcagaacttctctgggacaatttcagttctaataatgtccttaaattttatttccagctcctgttccttggaaaatctccattgtatgtgcattttttaaatgatgtctgtacataaaggcagttctgaaataaagaaaattttaaaataaaaaaaaaaaaaaaaaaaaaaaaaaaaaaaaaaaaaaaaaaaaaaaaaa

SEQ ID NO: 36 - protein, 241 aa, Homo sapiens [sequence omitted]

SEQ ID NO: 37 - DNA, 4650 bp, Homo sapiens
  CDS (1)..(4647)
atgagcctttcattttgtggtaacaacatttcttcatataatatcaacgatggtgtactacaaaattcctgctttgtggatgccctcaacctggtccctcatgtctttctgttgtttatcacttttccaatattgtttattgggtgggggagccaaagctcaaaagtacaaattcaccacaacacatggcttcattttccgggacataacctgagatggattcttacattcgctctcctgtttgtgcatgtctgtgaaatagcagaaggcattgtttcagactcgcggcgggaatcaaggcacctccacctctttatgccagccgtgatgggattcgttgccactacaacatcgatagtgtattatcataatatcgaaacatcaaattttcctaaattacttttagccctgttcctgtattgggtaatggcctttattacaaaaacaataaaattggttaagtactgtcagtctggcttggacatatcaaacctgcgtttctgcatcacaggcatgatggtcatcttgaatgggctcttgatggctgtggagatcaatgtcattcgagtcaggagatatgtatttttcatgaatcctcagaaagtaaagcctcctgaagacctccaggatctgggagtgagatttcttcaaccatttgtgaatttgctgtcaaaagcaacatactggtggatgaacacacttattatatctgctcacaaaaagcctattgatctgaaggcaattggaaaattgccaatagcaatgagagcagtaacaaattatgtttgcctgaaagatgcatatgaagaacaaaagaaaaaagttgcagatcatccaaatcggactccatctatatggcttgcaatgtacagagcttttgggcgaccaattctacttagtagcacattccgctatctggctgatttactgggttttgctggacctctttgtatttctggaatagttcagcgtgtgaatgaaacccagaatgggacaaataacacaactggaatttcagaaaccctctcatcaaaggaatttcttgaaaacgcttacgttctagcagttcttctcttcttggctcttattctgcaaaggacatttttgcaggcttcctactatgtaaccatagagactggcattaacctccgtggagctctgctggccatgatttataataaaatccttaggctctctacgtctaacttatccatgggggagatgactctggggcagatcaacaacttagtcgccattgaaactaatcaactcatgtggtttttgttcctgtgtcccaatctatgggctatgcctgttcagatcataatgggcgtgattctgctctataatttacttggatcaagtgcattggtcggtgcagctgtcattgtgctccttgcgccaattcagtactttattgctacaaagttggcagaggctcagaaaagtacacttgattattccactgagagactcaagaaaacaaatgaaatattgaaaggcatcaaacttctaaaattgtatgcctgggaacacattttctgcaaaagtgtggaggaaacaagaatgaaagaactatctagtctcaaaacctttgcactatatacatcactctccatcttcatgaatgcagcaattcccatagcagctgttcttgctacatttgtgacccatgcgtatgccagtggaaacaatctgaaacctgcagaggcctttgcttcactgtctctcttccatatcctggtcacaccactgtccctgctcttcacggtggtcagatttgcagtcaaagccatcataagtgttcaaaagctgaatgagtttctcttgagtgatgagattggtgacgacagttggcgaactggtgaaagttcgcttccttttgagtcctgtaagaagcacactggagttcagccaaaaactataaacaggaaacagcctggaagatatcacctggacagctatgagcaatcaacacggcgtctacgtcccgcagaaacagaggacattgcaataaaggtcacaaatggatacttttcatggggcagtggtttagctacattatccaatatagatattcgaattccaacaggtcagttaaccatgattgtgggccaagtaggatgtgggaagtcctctcttctccttgccatcctcggtgagatgcagacattggaaggaaaagttcactggagcaatgtaaatgaatctgagccttcttttgaagcaaccagaagtaggaacaggtactctgtggcatatgcagctcaaaagccttggctattaaatgctacagtagaagaaaatattacttttggaagtccttttaacaaacagaggtacaaagctgtcacagatgcctgttctcttcagccagatattgacttattaccatttggagatcaaactgaaattggagagaggggcatcaacctgagtgggggacagaggcagagaatctgtgtggcacgagcgctgtatcaaaacaccaacattgtctttttggatgatccattctcagccctggacattcacttgagtgatcatttaatgcaggaggggattttgaaattcctgcaagatgacaaaaggacactcgttcttgtgactcacaaattacagtatctgacgcatgctgactggatcatagccatgaaagatggaagtgtcctaagagaaggaactttgaaggacattcaaaccaaagatgttgagctttatgaacactggaaaacacttatgaatcggcaagatcaagaattagaaaaggatatggaagctgaccaaactactttagagaggaaaactctccgacgggccatgtattcaagagaagccaaagcccagatggaggacgaagacgaagaggaagaagaggaggaagatgaggatgataacatgtccactgtaatgaggctcaggactaaaatgccatggaaaacctgctggcgctacctgacatctggaggattcttcctgctcatcctgatgattttctctaagcttttgaagcattcggtcattgtagctatagactattggctggccacatggacatcggagtacagtataaacaatactggaaaagctgatcagacctactatgtggctggctttagcatactctgtggagcaggcattttcctttgccttgttacatccctcactgtagaatggatgggtctcacagctgccaaaaatcttcaccacaaccttctcaataagataatccttggaccaataaggttttttgataccacacccctgggactgattctcaatcgcttttcagctgatactaatatcattgatcagcacatccctccaaccttggaatctctaactcgctcaacactgctctgcctgtctgccattgggatgatttcttatgctactcctgtgttcctggttgctctcctgccccttggtgttgccttttattttatccagaaatactttcgggttgcctctaaggacctccaggaactcgacgatagtacccagctccctctgctctgtcacttctcagaaacagcagaaggactcaccaccattcgggcctttaggcatgaaaccagatttaaacaacgtatgctggaactgacggatacaaacaacattgcctacttatttctctcagctgccaacagatggctggaggtcaggacggattatctgggagcttgcattgtcctcactgcatctatagcatccattagtgggtcttccaattctggattggtaggcttgggtcttctgtatgcacttacgataaccaattatttgaattgggttgtgaggaacttggctgacctggaggtccagatgggtgcagtgaagaaggtgaacagtttcctgactatggagtcagagaactatgaaggcacaatggatccttctcaagttccagaacattggccacaagaaggggagatcaagatacatgatctgtgtgtcagatatgaaaataatctgaaacctgttcttaagcacgtcaaggcttacatcaaacctggacaaaaggtgggcatatgtggtcgcactggcagtgggaaatcatcgttatctctggctttcttcagaatggttgatatatttgatggaaaaattgtcattgatgggatagacatttccaaattaccactgcacacactacgttctagactttcaatcattctgcaggatccaatactattcagtggttccattagatttaatttagatccagagtgcaaatgcacagatgacagactctgggaagccttagaaattgctcagctgaagaatatggtcaaatctctacctggaggtctagatgcggttgtcactgaaggtggggagaattttagcgtgggacagagacagctattttgccttgccagggcctttgtccgcaaaagcagcattcttattatggatgaggcaacagcttccattgacatggccacagagaatattttgcaaaaagtagtaatgacagcctttgcagaccggaccgtggtgacaatggctcaccgtgtctcttctattatggatgcaggccttgttttagtcttttctgagggtattttagtggagtgtgatactgtcccaaatttgttcgcccacaagaatggccccttttccactttggtgatgaccaacaagtag

SEQ ID NO: 38 - protein, 1549 aa, Homo sapiens
MSLSFCGNNISSYNINDGVLQNSCFVDALNLVPHVFLLFITFPILFIGWGSQSSKVQIHHNTWLHFPGHNLRWILTFALLFVHVCEIAEGIVSDSRRESRHLHLFMPAVMGFVATTTSIVYYHNIETSNFPKLLLALFLYWVMAFITKTIKLVKYCQSGLDISNLRFCITGMMVILNGLLMAVEINVIRVRRYVFFMNPQKVKPPEDLQDLGVRFLQPFVNLLSKATYWWMNTLIISAHKKPIDLKAIGKLPIAMRAVTNYVCLKDAYEEQKKKVADHPNRTPSIWLAMYRAFGRPILLSSTFRYLADLLGFAGPLCISGIVQRVNETQNGTNNTTGISETLSSKEFLENAYVLAVLLFLALILQRTFLQASYYVTIETGINLRGALLAMIYNKILRLSTSNLSMGEMTLGQINNLVAIETNQLMWFLFLCPNLWAMPVQIIMGVILLYNLLGSSALVGAAVIVLLAPIQYFIATKLAEAQKSTLDYSTERLKKTNEILKGIKLLKLYAWEHIFCKSVEETRMKELSSLKTFALYTSLSIFMNAAIPIAAVLATFVTHAYASGNNLKPAEAFASLSLFHILVTPLSLLFTVVRFAVKAIISVQKLNEFLLSDEIGDDSWRTGESSLPFESCKKHTGVQPKTINRKQPGRYHLDSYEQSTRRLRPAETEDIAIKVTNGYFSWGSGLATLSNIDIRIPTGQLTMIVGQVGCGKSSLLLAILGEMQTLEGKVHWSNVNESEPSFEATRSRNRYSVAYAAQKPWLLNATVEENITFGSPFNKQRYKAVTDACSLQPDIDLLPFGDQTEIGERGINLSGGQRQRICVARALYQNTNIVFLDDPFSALDIHLSDHLMQEGILKFLQDDKRTLVLVTHKLQYLTHADWIIAMKDGSVLREGTLKDIQTKDVELYEHWKTLMNRQDQELEKDMEADQTTLERKTLRRAMYSREAKAQMEDEDEEEEEEEDEDDNMSTVMRLRTKMPWKTCWRYLTSGGFFLLILMIFSKLLKHSVIVAIDYWLATWTSEYSINNTGKADQTYYVAGFSILCGAGIFLCLVTSLTVEWMGLTAAKNLHHNLLNKIILGPIRFFDTTPLGLILNRFSADTNIIDQHIPPTLESLTRSTLLCLSAIGMISYATPVFLVALLPLGVAFYFIQKYFRVASKDLQELDDSTQLPLLCHFSETAEGLTTIRAFRHETRFKQRMLELTDTNNIAYLFLSAANRWLEVRTDYLGACIVLTASIASISGSSNSGLVGLGLLYALTITNYLNWVVRNLADLEVQMGAVKKVNSFLTMESENYEGTMDPSQVPEHWPQEGEIKIHDLCVRYENNLKPVLKHVKAYIKPGQKVGICGRTGSGKSSLSLAFFRMVDIFDGKIVIDGIDISKLPLHTLRSRLSIILQDPILFSGSIRFNLDPECKCTDDRLWEALEIAQLKNMVKSLPGGLDAVVTEGGENFSVGQRQLFCLARAFVRKSSILIMDEATASIDMATENILQKVVMTAFADRTVVTMAHRVSSIMDAGLVLVFSEGILVECDTVPNLFAHKNGPFSTLVMTNK

SEQ ID NO: 39 - DNA, 941 bp, Homo sapiens
  CDS (4)..(930)
gacatggaacaggataatacaacattgctgacagagtttgttctcacaggacttacatatcagccagagtggaaaatgcccctgttcttggtgttcttggtgatctatctcatcactattgtgtggaaccttggtctgattgctcttatctggaatgacccacaacttcacatccccatgtacttttttcttgggagtttagcctttgttgatgcttggatatcttccacagtaactcccaaaatgttggttaatttcttggccaaaaacaggatgatatctctgtctgaatgcatgattcaatttttttcctttgcatttggtggaactacagaatgttttctcttggcaacaatggcatatgatcgctatgtagccatatgcaaacctttactatatccagtgattatgaacaattcactatgcatacggctgttagccttctcatttttaggtggcttcctccatgccttaattcatgaagtccttatattcagattaaccttctgcaattctaacataatacatcatttttactgtgatattataccactgtttatgatttcctgtactgacccttctattaattttctaatggtttttattttgtctggctcaattcaggtattcaccattgtgacagttcttaattcttacacatttgctcttttcacaatcctaaaaaagaagtctgttagaggcgtaaggaaagccttttccacctgtggagcccatctcttatctgtctctttatattatggcccacttatcttcatgtatttgcgccctgcatctccacaagcagatgaccaggatatgatagactctgtcttttatacaatcataattcctttgctaaatcccattatctacagtctgagaaataaacaagtaatagattcattcacaaaaatggtaaaaagaaatgtttagatttcata

SEQ ID NO: 40 - protein, 309 aa, Homo sapiens
MEQDNTTLLTEFVLTGLTYQPEWKMPLFLVFLVIYLITIVWNLGLIALIWNDPQLHIPMYFFLGSLAFVDAWISSTVTPKMLVNFLAKNRMISLSECMIQFFSFAFGGTTECFLLATMAYDRYVAICKPLLYPVIMNNSLCIRLLAFSFLGGFLHALIHEVLIFRLTFCNSNIIHHFYCDIIPLFMISCTDPSINFLMVFILSGSIQVFTIVTVLNSYTFALFTILKKKSVRGVRKAFSTCGAHLLSVSLYYGPLIFMYLRPASPQADDQDMIDSVFYTIIIPLLNPIIYSLRNKQVIDSFTKMVKRNV

SEQ ID NO: 41 - DNA, 941 bp, Homo sapiens
  CDS (4)..(930)
gacatggaacaggataatacaacattgctgacagagtttgttctcacaggacttacatatcagccagagtggaaaatgcccctgttcttggtgttcttggtgatctatctcatcactattgtgtggaaccttggtctgattgctcttatctggaatgacccacaacttcacatccccatgtacttttttcttgggagtttagcctttgttgatgcttggatatcttccacagtaactcccaaaatgttggttaatttcttggccaaaaacaggatgatatctctgtctgaatgcatgattcaatttttttcctttgcatttggtggaactacagaatgttttctcttggcaacaatggcatatgatcgctatgtagccatatgcaaacctttactatatccagtgattatgaacaattcactatgcatacggctgttagccttctcatttttaggtggcttcctccatgccttaattcatgaagtccttatattcagattaaccttctgcaattctaacataatacatcatttttactgtgatattataccactgtttatgatttcctgtactgacccttctattaattttctaatggtttttattttgtctggctcaattcaggtattcaccattgtgacagttcttaattcttacacatttgctcttttcacaatcctaaaaaagaagtctgttagaggcgtaaggaaagccttttccacctgtggagcccatctcttatctgtctctttatattatggcccacttatcttcatgtatttgcgccctgcatctccacaagcagatgaccaagatatgatagactctgtcttttatacaatcataattcctttgctaaatcccattatctacagtctgagaaataaacaagtaatagattcattcacaaaaatggtaaaaagaaatgtttagatttcata

SEQ ID NO: 42 - protein, 309 aa, Homo sapiens; identical to SEQ ID NO: 40

SEQ ID NO: 43 - DNA, 959 bp, Homo sapiens
  CDS (10)..(945)
tctgaggcaatgaatggaatgaatcactctgtggtatcagaatttgtattcatgggactcaccaactcacgggagattcagcttctactttttgttttctctttgttgttctactttgcgagcatgatgggaaaccttgtcattgtattcactgtaaccatggatgctcatctgcactcccccatgtatttcctcctggctaacctctcaatcattgatatggcattttgctcaattacagcccctaagatgatttgtgatattttcaagaagcacaaggccatctcctttcggggatgtattactcagatcttctttagccatgctcttgggggcactgagatggtgctgctcatagccatggcctttgacagatacatggccatatgtaaacctctccactacctgaccatcatgagcccaagaatgtgtctatactttttagccacttcctctatcattggccttatccactcattggtccaattagtttttgtggtagatttacctttttgtggtcctaatatctttgacagtttttactgtgatctccctcggctcctcagacttgcctgtaccaacacccaagaactggagttcatggtcactgtcaatagtggactcatttctgtgggctcctttgtcttgctggtaatttcctacatcttcattctgttcactgtttggaaacattcttctggtggtctagccaaggccctctctaccctgtcagctcatgtcactgtggtcatcttgttctttgggccactgatgtttttctacacatggccttctcccacatcacacctggataaatatcttgctatttttgatgcatttattactccttttctgaatccagttatctacacattcaggaacaaagacatgaaagtggcaatgaggagactgtgcagtcgtcttgcgcattttacaaagattttgtaaatggcttggct

SEQ ID NO: 44 - protein, 312 aa, Homo sapiens
MNGMNHSVVSEFVFMGLTNSREIQLLLFVFSLLFYFASMMGNLVIVFTVTMDAHLHSPMYFLLANLSIIDMAFCSITAPKMICDIFKKHKAISFRGCITQIFFSHALGGTEMVLLIAMAFDRYMAICKPLHYLTIMSPRMCLYFLATSSIIGLIHSLVQLVFVVDLPFCGPNIFDSFYCDLPRLLRLACTNTQELEFMVTVNSGLISVGSFVLLVISYIFILFTVWKHSSGGLAKALSTLSAHVTVVILFFGPLMFFYTWPSPTSHLDKYLAIFDAFITPFLNPVIYTFRNKDMKVAMRRLCSRLAHFTKIL

SEQ ID NO: 45 - DNA, 981 bp, Homo sapiens
  CDS (1)..(900)
atgttccgggagaacatccaagatgtgctatctgcgctgcccaatcctgatgactacttcctcctgcgctggctccaagctcggagctttgacctgcagaaatcagaggacatgctgaggaagcatatggagttccggaagcaacaagacctggccaacatccttgcctggcagcccccagaggtggtcaggctgtacaacgctaacggcatatgcggccacgacggtgagggcagccctgtctggtaccacattgtgggaagcctggaccccaaaggcctcttgctctcagcctccaaacaggagttgctcagggacagcttccggagctgcgagctgctcctgcgggagtgtgagctgcagagtcagaagctggggaagaaggtggagaaaatcatagctatttttggtctcgaagggctgggcctgagggatctgtggaagccaggaatagagcttctccaggagtttttctcagcacttgaagcaaattaccctgagatcttgaagagtttaattgttgtgagagcccccaagctattcgccgtagccttcaacctggtcaagtcttacatgagtgaagagacacgcaggaaggtggtgattctcggagacaactggaagcaggagctgacaaaattcatcagccccgaccagctgcccgtggagtttggggggaccatgactgaccccgatggcaaccccaagtgcctgaccaagatcaactacgggggtgaggtgcccaagagctactacctgtgcaagcaggtgaggctgcagtatgagcacacgaggtccgtgggccgcggctcctccctgcaggtggagaacgagatcctgttcccgggctgtgtgctcagatgtcctgaggttttacaacacctacagcctggttcattctaaacgcatcagctacaccgtggaggtactgctcccagaccaaaccttcatggagaagatggagaattctagaaggcgatt

SEQ ID NO: 46 - protein, 300 aa, Homo sapiens
MFRENIQDVLSALPNPDDYFLLRWLQARSFDLQKSEDMLRKHMEFRKQQDLANILAWQPPEVVRLYNANGICGHDGEGSPVWYHIVGSLDPKGLLLSASKQELLRDSFRSCELLLRECELQSQKLGKKVEKIIAIFGLEGLGLRDLWKPGIELLQEFFSALEANYPEILKSLIVVRAPKLFAVAFNLVKSYMSEETRRKVVILGDNWKQELTKFISPDQLPVEFGGTMTDPDGNPKCLTKINYGGEVPKSYYLCKQVRLQYEHTRSVGRGSSLQVENEILFPGCVLRCPEVLQHLQPGSF

SEQ ID NO: 47 - DNA, 877 bp, Homo sapiens
  CDS (1)..(804)
atgttccgggagaacatccaagatgtgctatctgcgctgcccaatcctgatgactacttcctcctgcgctggctccgagctcggagctttgacctgcaaaaatcagaggacatgctgaggaagcatatggagttccggaagcaacaagacctggccaacatccttgcctggcagcccccagaggtggtcaggctgtacaacgctaacggcatatgcggccacgacggtgagggcagccctgtctggtaccacattgtgggaagcctggaccccaaaggcctcttgctctcagcctccaaacaggagttgctcagggacagcttccggagctgcgagctgctcctgcgggagtgtgagctgcagagtcagaagtttttctcagcacttgaagcaaattaccctgagatcttgaagagtttaattgttgtgagagcccccaagctattcgccgtagccttcaacctggtcaagtcttacatgagtgaagagacacgcaggaaggtggtgattctcggagacaactggaagcaggagctgacaaaattcatcagccccgaccagctgcccgtggagtttggggggaccatgactgaccccgatggcaaccccaagtgcctgaccaagatcaactacgggggtgaggtgcccaagagctactacctgtgcaagcaggtgaggctgcagtatgagcacacgaggtccgtgggccgcggctcctccctgcaggtggagaacgagatcctgttcccgggctgtgtgctcagatgtcctgaggttttacaacacctacagcctggttcattctaaacgcatcagctacaccgtggaggtactgctcccagaccaaaccttcatggagaagatggagaaattctag

SEQ ID NO: 48 - protein, 268 aa, Homo sapiens
MFRENIQDVLSALPNPDDYFLLRWLRARSFDLQKSEDMLRKHMEFRKQQDLANILAWQPPEVVRLYNANGICGHDGEGSPVWYHIVGSLDPKGLLLSASKQELLRDSFRSCELLLRECELQSQKFFSALEANYPEILKSLIVVRAPKLFAVAFNLVKSYMSEETRRKVVILGDNWKQELTKFISPDQLPVEFGGTMTDPDGNPKCLTKINYGGEVPKSYYLCKQVRLQYEHTRSVGRGSSLQVENEILFPGCVLRCPEVLQHLQPGSF

SEQ ID NO: 49 - DNA, 2034 bp, Homo sapiens
  CDS (61)..(1725)
cgggcggagcgggcatggtggggtgtcgggggccgcaggcgtagcgctctcgccctggccatggagcggccggcgcccggcgaggtggtcatgagccaagccatccagccggcgcacgccactgcgcgcggcgagctgagcgcggggcagctgctcaagtggatcgacaccaccgcctgcctggcggctgagaaacatgctggagtttcctgcgttacagcctcagtggatgacatacagtttgaggagacagctagagttggacaagttataaccatcaaagcaaaagttactagagcattcagcacaagcatggagatcagtatcaaggtcatggtacaggatatgctcactggcattgagaagcttgttagtgtggctttctccacatttgtagccaaaccagttggaaaagaaaagattcatttaaaaccagtcacacttctaactgaacaagatcatgtggaacataatctggctgctgagagaaggaaagttcgattacaacatgaagatacctttaacaatttaatgaaggaaagtagcaaatttgatgatctcatttttgatgaagaggaaggagcggtttccacaaggggcacctccgttcagagcattgaactggtcctcccaccccatgcaaaccatcacggaaatacatttggtggccagattatggcgtggatggagacagtggctactatttctgcaagccgcctgtgttgggctcatccctttctgaagtccgtagatatgtttaagttccggggaccatctacagttggagatcgtcttgtcttcactgccattgtcaacaatacatttcagacctgtgttgaagttggagttcgcgtggaggcctttgactgtcaggaatgggccgagggccgagggcgtcacatcaacagtgcttttctcatttacaattctgctgatgataaggaaaatctcatcacgtttcccagaatccaacccatttcaaaggatgatttcagacgctatcggggagctattgcacgcaagcgaattcgcctaggcagaaaatatgttatttcccacaaagaagaggttccactttgcatacactgggatatcagcaagcaggcatccctgagtgacagcaatgtggaggccctcaaaaaactggcagccaaaaggggttgggaggttaccagcactgtggaaaagataaaaatatatactctggaagagcatgatgttttatctgtttgggttgaaaagcacgtgggaagtccagcacatttggcttatcgtctcttgtctgactttacaaagcgacctttgtgggacccccattttgtgtcctgtgaagtcatagactgggtgagtgaagatgatcagctgtatcacatcacctgtcctatactgaatgatgacaaacccaaagacttggtagtactcgtatcacgaagaaaacccctcaaagatggtaacacttacacagtggcagtgaagtcggtcattttgccatcggtccccccgtctccacagtacatcagaagtgaaatcatatgtgccggatttctcatccatgctattgacagcaattcatgcatcgtatcttactttaaccatatgtctgctagcatccttccttactttgctggaaatcttggtggctggtcaaaatccattgaagaaacagcagcctcttgtatacagttcttagagaatcctcctgatgatgggtttgtaagcacattttaaaggtcaactttcaattactggtaatttaatttcccacttttaattccaagcacccttagccctgacatctgtcaagctttggggccacaaaataatttaatataaccctaagcaaaatgcagtgacggagttaaaaaacaaaatgcatcttaagtcaaataccagtgatttggattagcattaaaagagctttagaattctgttgtaagtcatctgtggctctgcctcttccaggggcacagatagtggaaaattgcctgtatgcaatactatgtgttctataaaatggcatgaatttagtttaaa

SEQ ID NO: 50 - protein, 555 aa, Homo sapiens
MERPAPGEVVMSQAIQPAHATARGELSAGQLLKWIDTTACLAAEKHAGVSCVTASVDDIQFEETARVGQVITIKAKVTRAFSTSMEISIKVMVQDMLTGIEKLVSVAFSTFVAKPVGKEKIHLKPVTLLTEQDHVEHNLAAERRKVRLQHEDTFNNLMKESSKFDDLIFDEEEGAVSTRGTSVQSIELVLPPHANHHGNTFGGQIMAWMETVATISASRLCWAHPFLKSVDMFKFRGPSTVGDRLVFTAIVNNTFQTCVEVGVRVEAFDCQEWAEGRGRHINSAFLIYNSADDKENLITFPRIQPISKDDFRRYRGAIARKRIRLGRKYVISHKEEVPLCIHWDISKQASLSDSNVEALKKLAAKRGWEVTSTVEKIKIYTLEEHDVLSVWVEKHVGSPAHLAYRLLSDFTKRPLWDPHFVSCEVIDWVSEDDQLYHITCPILNDDKPKDLVVLVSRRKPLKDGNTYTVAVKSVILPSVPPSPQYIRSEIICAGFLIHAIDSNSCIVSYFNHMSASILPYFAGNLGGWSKSIEETAASCIQFLENPPDDGFVSTF

SEQ ID NO: 51 - DNA, 1583 bp, Homo sapiens
  CDS (16)..(1059)
ggctgagagcgcgccatggggcaggcgggctgcaaggggctctgcctgtcgctgttcgactacaagaccgagaagtatgtcatcgccaagaacaagaaggtgggcctgctgtaccggctgctgcaggcctccatcctggcgtacctggtcgtatgggtgttcctgataaagaagggttaccaagacgtcgacacctccctgcagagtgctgtcatcaccaaagtcaagggcgtggccttcaccaacacctcggatcttgggcagcggatctgggatgtcgccgactacgtcattccagcccagggagagaacgtcttttttgtggtcaccaacctgattgtgacccccaaccagcggcagaacgtctgtgctgagaatgaaggcattcctgatggcgcgtgctccaaggacagcgactgccacgctggggaagcggttacagctggaaacggagtgaagaccggccgctgcctgcggagagagaacttggccaggggcacctgtgagatctttgcctggtgcccgttggagacaagctccaggccggaggagccattcctgaaggaggccgaagacttcaccattttcataaagaaccacatccgtttccccaaattcaacttctccaaccgtctggacaataaactttcaaagtctgtctcctccgggtacaacttcagatttgccagatattaccgagacgcagccggggtggagttccgcaccctgatgaaagcctacgggatccgctttgacgtgatggtgaacggcaagggtgctttcttctgcgacctggtactcatctacctcatcaaaaagagagagttttaccgtgacaagaagtacgaggaagtgaggggcctagaagacagttcccaggaggccgaggacgaggcatcggggctggggctatctgagcagctcacatctgggccagggctgctggggatgccggagcagcaggagctgcaggagccacccgaggcgaagcgtggaagcagcagtcagaaggggaacggatctgtgtgcccacagctcctggagccccacaggagcacgtgaattgcctctgcttacgttcaggccctgtcctaaacccagccgtctagcacccagtgatcccatgcctttgggaatcccaggatgctgcccaacgggaaatttgtacattgggtgctatcaatgccacatcacagggaccagccatcacagagcaaagtgacctccacgtctgatgctggggtcatcaggacggacccatcatggctgtctttttgccccaccccctgccgtcagttcttcctttctccgtggctggcttcccgcactagggaacgggttgtaaatggggaacatgacttccttccggagtccttgagcacctcagctaaggaccgcagtgccctgtagagttcctagattacctcactgggaatagcattgtgcgtgtccggaaaagggctccatttggttccagcccactcccctctgcaagtgccacagcttccctcagagcatactctccagtggatccaagtactctctctcctaaagacaccaccttcctgccagctgtttgccct

SEQ ID NO: 52 - protein, 348 aa, Homo sapiens
MGQAGCKGLCLSLFDYKTEKYVIAKNKKVGLLYRLLQASILAYLVVWVFLIKKGYQDVDTSLQSAVITKVKGVAFTNTSDLGQRIWDVADYVIPAQGENVFFVVTNLIVTPNQRQNVCAENEGIPDGACSKDSDCHAGEAVTAGNGVKTGRCLRRENLARGTCEIFAWCPLETSSRPEEPFLKEAEDFTIFIKNHIRFPKFNFSNRLDNKLSKSVSSGYNFRFARYYRDAAGVEFRTLMKAYGIRFDVMVNGKGAFFCDLVLIYLIKKREFYRDKKYEEVRGLEDSSQEAEDEASGLGLSEQLTSGPGLLGMPEQQELQEPPEAKRGSSSQKGNGSVCPQLLEPHRST

SEQ ID NO: 53 - DNA, 1616 bp, Homo sapiens
  CDS (37)..(858)
ggcacgagggtccgcaagcccggctgagagcgcgccatggggcaggcgggctgcaaggggctctgcctgtcgctgttcgactacaagaccgagaagtatgtcatcgccaagaacaagaaggtgggcctgctgtaccggctgctgcaggcctccatcctggcgtacctggtcgtatgggtgttcctgataaagaagggttaccaagacgtcgacacctccctgcagagtgctgtcatcaccaaagtcaagggcgtggccttcaccaacacctcggatcttgggcagcggatctgggatgtcgccgactacgtcattccagcccagggagagaacgtcttttttgtggtcaccaacctgattgtgacccccaaccagcggcagaacgtctgtgctgagaatgaaggcattcctgatggcgcgtgctccaaggacagcgactgccacgctggggaagcggttacagctggaaacggagtgaagaccggccgctgcctgcggagagggaacttggccaggggcacctgtgagatctttgcctggtgcccgttggagacaagctccaggccggaggagccattcctgaaggaggccgaagacttcaccattttcataaagaaccacatccgtttccccaaattcaacttctccaacaatgtgatggacgtcaaggacagatctttcctgaaatcatgccactttggccccaagaaccactactgccccatcttccgactgggctccgtgatccgctgggccgggagcgacttccaggatatagccctggagatttgccagatattaccgagacgcagccggggtggagttccgcaccctgatgaaagcctacgggatccgctttgacgtgatggtgaacggcaaggcagggaagttcagcatcattcccaccatcatcaacgtgggctctggggtggcgctcatgggtgctggtgctttcttctgcgacctggtactcatctacctcatcaaaaagagagagttttaccgtgacaagaagtacgaggaagtgaggggcctagaagacagttcccaggaggccgaggacgaggcatcggggctggggctatctgagcagctcacatctgggccagggctgctggggatgccggagcagcaggagctgcaggagccacccgaggcgaagcgtggaagcagcagtcagaaggggaacggatctgtgtgcccacagctcctggagccccacaggagcacgtgaattgcctctgcttacgttcaggccctgtcctaaacccagccgtctagcacccagtgatcccatgcctttgggaatcccaggatgctgcccaacgggaaatttgtacattgggtgctatcaatgccacatcacagggaccagccatcacagagcaaagtgacctccacgtctgatgctggggtcatcaggacggacccatcatggctgtctttttgccccaccccctgccgtcagttcttcctttctccgtggctggcttcccgcactagggaacgggttgtaaatggggaacatgacttccttccggagtccttgagcacctcagctaaggaccgcagtgccctgtagagttcctagattacctcactgggaatagcattgt

SEQ ID NO: 54 - protein, 274 aa, Homo sapiens
MGQAGCKGLCLSLFDYKTEKYVIAKNKKVGLLYRLLQASILAYLVVWVFLIKKGYQDVDTSLQSAVITKVKGVAFTNTSDLGQRIWDVADYVIPAQGENVFFVVTNLIVTPNQRQNVCAENEGIPDGACSKDSDCHAGEAVTAGNGVKTGRCLRRGNLARGTCEIFAWCPLETSSRPEEPFLKEAEDFTIFIKNHIRFPKFNFSNNVMDVKDRSFLKSCHFGPKNHYCPIFRLGSVIRWAGSDFQDIALEICQILPRRSRGGVPHPDESLRDPL

SEQ ID NO: 55 - DNA, 1596 bp, Homo sapiens
  CDS (31)..(1572)
ggggaacccgaggccgccggcgcccggaccatgtcgtctccggggccgtcgcagccgccggccgaggacccgccctggcccgcgcgcctcctgcgtgcgcctctggggctgctgcggctggaccccagcgggggcgcgctgctgctatgcggcctcgtagcgctgctgggctggagctggctgcggaggcgccgggcgcggggcatcccgcccgggcccacgccctggcctctggtgggcaacttcggtcacgtgctgctgcctcccttcctccggcggcggagctggctgagcagcaggaccagggccgcagggattgatccctcggtcataggcccgcaggtgctcctggctcacctagcccgcgtgtacggcagcatcttcagcttctttatcggccactacctggtggtggtcctcagcgacttccacagcgtgcgcgaggcgctggtgcagcaggccgaggtcttcagcgaccgcccgcgggtgccgctcatctccatcgtgaccaaggagaagggtgttgtgtttgcacattatggtcccgtctggagacaacaaaggaagttctctcattcaactcttcgtcattttgggttgggaaaacttagcttggagcccaagattattgaggagttcaaatatgtgaaagcagaaatgcaaaagcacggagaagaccccttctgccctttctccatcatcagcaatgccgtctctaacatcatttgctccttgtgctttggccagcgctttgattacactaatagtgagttcaagaaaatgcttggttttatgtcacgaggcctagaaatctgtctgaacagtcaagtcctcctggtcaacatatgcccttggctttattaccttccctttggaccatttaaggaattaagacaaattgaaaaggatataaccagtttccttaaaaaaatcatcaaagaccatcaagagtctctggatagagagaaccctcaggacttcatagacatgtaccttctccacatggaagaggagaggaaaaataatagtaacagcagttttgatgaagagtacttattttatatcattggggatctctttattgctgggactgataccacaactaactctttgctctggtgcctgctgtatatgtcgctgaaccccgatgtacaagaaaaggttcatgaagaaattgaaagagtcattggcgccaaccgagctccttccctcacagacaaggcccagatgccctacacagaagccaccatcatggaagtgcagaggctaactgtggtggtgccgcttgccattcctcatatgacctcagagaacacagtgctccaagggtataccattcctaaaggcacattgatcttacccaacctgtggtcagtacatagagacccagccatttgggagaaaccggaggatttctaccctaatcgatttctggatgaccaaggacaactaattaaaaaagaaacctttattccttttgggataggtcagttagcctttacattttacatatatatgtgtgtgtgtgtgtgtgtgtgtgtatgtgtgtgtgtgtgtgtgtgtgtgtgtgtatagttgaatgaatgcgtgaataaa

SEQ ID NO: 56 - protein, 514 aa, Homo sapiens
MSSPGPSQPPAEDPPWPARLLRAPLGLLRLDPSGGALLLCGLVALLGWSWLRRRRARGIPPGPTPWPLVGNFGHVLLPPFLRRRSWLSSRTRAAGIDPSVIGPQVLLAHLARVYGSIFSFFIGHYLVVVLSDFHSVREALVQQAEVFSDRPRVPLISIVTKEKGVVFAHYGPVWRQQRKFSHSTLRHFGLGKLSLEPKIIEEFKYVKAEMQKHGEDPFCPFSIISNAVSNIICSLCFGQRFDYTNSEFKKMLGFMSRGLEICLNSQVLLVNICPWLYYLPFGPFKELRQIEKDITSFLKKIIKDHQESLDRENPQDFIDMYLLHMEEERKNNSNSSFDEEYLFYIIGDLFIAGTDTTTNSLLWCLLYMSLNPDVQEKVHEEIERVIGANRAPSLTDKAQMPYTEATIMEVQRLTVVVPLAIPHMTSENTVLQGYTIPKGTLILPNLWSVHRDPAIWEKPEDFYPNRFLDDQGQLIKKETFIPFGIGQLAFTFYIYMCVCVCVCVCVCVCVCVCV

SEQ ID NO: 57 - DNA, 3853 bp, Homo sapiens
  CDS (61)..(3834)
cgcctgtccctagctgtggctgagccaagattgcacttgtgagaaggcctgacaggcagcatgggcgacatggccaatagttccatcgagttccaccccaagccccagcagcagcgggatgtcccccaggctggaggctttgggtgcacgctggcggagctgcgcaccctcatggagctgcgaggggccgaggcgctgcagaagatcgaggaggcctacggggatgtcagcgggctctgccggaggctgaagacctcacccacagagggcctggcggacaacaccaatgacctggagaagcgcaggcagatctacgggcagaacttcatccccccaaagcaacccaagaccttcctgcagctggtgtgggaggccctgcaggacgtgaccctcatcatcctggaggtggctgccatcgtctctctgggcctctcgttctatgcgccgccaggagaggagagtgaagcctgtgggaatgtgtcgggaggcgcagaagatgagggcgaggccgaagctggctggatcgagggggctgccatcctgctgtccgtcatctgtgtggtgctggtcacggccttcaatgactggagcaaggagaagcagttccgaggcctgcagagccgaattgagcaggagcagaagttcacggtcatccggaacgggcagctcctccaggtccccgtggctgcgctggtggtgggggacattgcccaggtcaagtacggcgacctgctgccagccgacggcgtgctcatccaggccaatgacctcaagatcgacgagagctccctgacgggcgagtctgaccacgtgcgcaagtcagctgacaaagatcccatgctgctctcaggcactcatgtcatggaaggttctggaagaatggtggtgaccgccgttggcgtgaattcccagacaggcatcatcttcacgctgcttggagctggcggagaggaggaagagaagaaagataagaaaggcaagcagcaggatggggccatggagagtagccagaccaaagctaagaagcaggatggtgcagtggccatggagatgcagcccctgaagagcgcggagggtggggagatggaggagcgggagaagaagaaagccaacgcacccaaaaaggagaagtctgtccttcaggggaagctcacaaagctagccgtgcagatcgggaaagcagggctggtgatgtctgccatcaccgtcatcatcctggtcctctactttgtgattgagacgtttgtcgtggaaggccggacatggctggcagagtgcacgccggtctatgtacaatacttcgtgaagttcttcatcattggtgtcactgtgctggtcgtggctgtcccagagggcctgcctcttgctgtcaccatctccttagcttactctgtcaagaaaatgatgaaagacaacaacctggtgcgccacctggatgcctgcgagaccatgggcaacgccacagccatctgctccgacaagacgggcacgctcaccaccaaccgtatgaccgtggtccagtcctacctaggggacacccactacaaagagattccggcccccagcgccctgacccctaagatcctcgacctcctggtccatgccatctccatcaacagtgcctataccaccaaaatactacctcctgagaaggaaggcgccctcccacgccaggtgggcaataagacggagtgcgccctgctgggcttcgtcttggacctgaagcgggacttccagcccgtgcgcgagcagatcccggaagacaagctttacaaagtgtacaccttcaactcggtccgcaagtccatgagcacagtcatccgcatgcccgacggtggcttccgcctcttcagcaagggggcctcagagatcctcttgaaaaagtgcaccaacatcttgaacagcaatggcgaactccggggctttcggcctcgggaccgggacgacatggtgaggaagatcatcgagccgatggcttgcgatggcctccgcaccatctgcatcgcctaccgggacttctctgcaggccaggagcccgactgggacaacgagaatgaggtcgtgggtgacctcacctgcatagctgtcgtgggcattgaggaccctgtgcggcccgaggtccctgaagctatccgaaaatgccagcgtgctggcatcacagtccgcatggtgactggggacaacatcaacacggcccgggccatcgcagccaaatgcggcatcatccagcccggggaggacttcctgtgcctagaagggaaggagttcaaccggcggatccgcaatgagaaaggcgagatagaacaggagcggctggacaaggtgtggcccaagctgagggtgctggcccggtcgtctcccaccgacaagcacacactggtcaaagggattatcgacagcaccactggtgagcagcggcaggtggtggctgtgacaggggatggcaccaacgatgggccggccctcaagaaggcggacgtgggcttcgccatgggcatcgcagggaccgacgtggccaaggaggcctccgacatcatcctgaccgatgacaacttcaccagcatcgtcaaggcagtcatgtggggccgtaacgtctatgacagcatctccaagttcctgcagtttcaactgacggtcaatgtggtggctgtgatcgtggccttcacaggtgcctgcattactcaggactctcctctcaaagccgtgcagatgttgtgggtgaacttgatcatggacacatttgcctctctggccctggcgacggagccacccacagagtcgctgctgctgcggaagccgtacggccgcgacaagcccctcatctcccgcaccatgatgaagaacattctgggccacgccgtgtaccagctcgccatcatcttcaccctgctgtttgtcggggagctcttcttcgacatcgacagcgggaggaatgcgcccctgcactcgccaccctcagagcactacaccatcatcttcaacacgttcgtcatgatgcagctctttaacgagatcaacgcccgcaagatccacggcgagaggaacgtgttcgacggcatcttcagcaaccccatcttctgcaccatcgttttgggcactttcgggattcagattgtcatcgtccagtttggcgggaagcccttcagctgctccccactatccacagaacagtggctctggtgcctgtttgttggtgttggggagctggtctggggacaggtcattgccaccatccccaccagccagctcaagtgcctgaaggaagccgggcacgggcccgggaaggacgagatgaccgacgaggagctggccgaaggcgaggaagagatcgaccatgccgagcgggagctccgcaggggccagatcctctggttccggggcctgaaccggattcagacgcagatggaggtagtgagtaccttcaagagaagcggttcagttcagggtgctgtgcgccggcggtcttcggtcctcagccagcttcatgacgtaaccaatctttctacccctactcacatccgggtggtgaaagcgttccgtagctcgctctatgaaggcctggagaaaccagaatccaagacctccattcacaacttcatggccacgcccgagtttctgatcaatgactacacccacaacatcccgctcattgacgacacggacgtggacgagaacgaggagcgcctccgggcccccccgcccccgtcccccaaccagaacaacaacgccatagacagcggcatctacctgaccacgcatgtcaccaagtcagctacctcttcagtgttttcctccagtcccgggagcccgctccacagcgtggagacgtccctctaacaagaacttgtctcag

SEQ ID NO: 58 - protein, 1258 aa, Homo sapiens
MGDMANSSIEFHPKPQQQRDVPQAGGFGCTLAELRTLMELRGAEALQKIEEAYGDVSGLCRRLKTSPTEGLADNTNDLEKRRQIYGQNFIPPKQPKTFLQLVWEALQDVTLIILEVAAIVSLGLSFYAPPGEESEACGNVSGGAEDEGEAEAGWIEGAAILLSVICVVLVTAFNDWSKEKQFRGLQSRIEQEQKFTVIRNGQLLQVPVAALVVGDIAQVKYGDLLPADGVLIQANDLKIDESSLTGESDHVRKSADKDPMLLSGTHVMEGSGRMVVTAVGVNSQTGIIFTLLGAGGEEEEKKDKKGKQQDGAMESSQTKAKKQDGAVAMEMQPLKSAEGGEMEEREKKKANAPKKEKSVLQGKLTKLAVQIGKAGLVMSAITVIILVLYFVIETFVVEGRTWLAECTPVYVQYFVKFFIIGVTVLVVAVPEGLPLAVTISLAYSVKKMMKDNNLVRHLDACETMGNATAICSDKTGTLTTNRMTVVQSYLGDTHYKEIPAPSALTPKILDLLVHAISINSAYTTKILPPEKEGALPRQVGNKTECALLGFVLDLKRDFQPVREQIPEDKLYKVYTFNSVRKSMSTVIRMPDGGFRLFSKGASEILLKKCTNILNSNGELRGFRPRDRDDMVRKIIEPMACDGLRTICIAYRDFSAGQEPDWDNENEVVGDLTCIAVVGIEDPVRPEVPEAIRKCQRAGITVRMVTGDNINTARAIAAKCGIIQPGEDFLCLEGKEFNRRIRNEKGEIEQERLDKVWPKLRVLARSSPTDKHTLVKGIIDSTTGEQRQVVAVTGDGTNDGPALKKADVGFAMGIAGTDVAKEASDIILTDDNFTSIVKAVMWGRNVYDSISKFLQFQLTVNVVAVIVAFTGACITQDSPLKAVQMLWVNLIMDTFASLALATEPPTESLLLRKPYGRDKPLISRTMMKNILGHAVYQLAIIFTLLFVGELFFDIDSGRNAPLHSPPSEHYTIIFNTFVMMQLFNEINARKIHGERNVFDGIFSNPIFCTIVLGTFGIQIVIVQFGGKPFSCSPLSTEQWLWCLFVGVGELVWGQVIATIPTSQLKCLKEAGHGPGKDEMTDEELAEGEEEIDHAERELRRGQILWFRGLNRIQTQMEVVSTFKRSGSVQGAVRRRSSVLSQLHDVTNLSTPTHIRVVKAFRSSLYEGLEKPESKTSIHNFMATPEFLINDYTHNIPLIDDTDVDENEERLRAPPPPSPNQNNNAIDSGIYLTTHVTKSATSSVFSSSPGSPLHSVETSL

SEQ ID NO: 59 - DNA, 4092 bp, Homo sapiens
  CDS (455)..(3847)
gggcggtggtgccgcgtcggggaagagcgcatcccgcggggtgccgagcccggcgctggcggagagacgggggcgccccctccccacaggaggagcctcgcgctcctccgccatccttcccccgcgcggcgggctcgccttctcagtgggtgctgcgcgagctgccggcccggggtgccggggccagataagggcgatccgcggggccgccgcccccgggtcaggcaggccgggggcgggccgcgagtgaggcggggcggcggctaggctgcgggcggctggggggcgggggagcgcggagagccgaggggggcaggcggcgagcgggtggcccggccgcccgcctcgctgctccgcttggcgccgccggcccacgccgcagtgtgttttgtggacggcgccttcccagacagcccggtagagcccagctcagcgcccggcagccttcgacgcgatgttccgccggagcttgaatcgtttttgtgctggagaagagaaacgagttggcacacgcacagtgtttgttggcaatcatccagtttcggaaacagaagcttacattgcacaaagattttgtgataatagaatagtctcatctaagtatacactttggaattttctcccaaagaatctgtttgaacagtttagaagaattgcaaatttttattttctcataatcttccttgtacaggtcacagtagacacaccaactagcccagttaccagtggacttccacttttctttgttataactgttacagccatcaagcagggatatgaggattggctgagacacagagctgacaatgaagtcaacaaaagcactgtttacattattgaaaatgcaaagcgagtgagaaaagaaagtgaaaaaatcaaggttggtgatgtagtagaagtacaggcagatgaaacctttccctgtgatcttattcttctatcatcttgcaccactgatggaacctgttatgtcactacagccagtcttgatggggaatccaattgcaagacacattatgcagtacgtgataccattgcactgtgtacagcagaatccatcgataccctccgagcagcaattgaatgtgaacagcctcaacctgacctctacaaatttgttgggcgaatcaatatctacagtaatagtcttgaggctgttgccaggtctttgggacctgaaaatctcttgctgaaaggagctacgctaaaaaataccgagaagatatatggagttgctgtttacactggaatggaaaccaaaatggctttgaactaccaagggaaatctcagaaacgttctgctgttgaaaaatctattaatgctttcctgattgtatatttatttatcttactgaccaaagctgcagtatgcactactctaaagtatgtttggcaaagtaccccatacaatgatgaaccttggtataaccaaaagactcagaaagagcgagagaccttgaaggttttaaaaatgttcaccgacttcctatcatttatggttctattcaactttatcattcctgtctccatgtacgtcacagtagaaatgcagaaattcttgggctccttcttcatctcatgggataaggacttttatgatgaagaaattaatgaaggagccctggttaacacatcagaccttaatgaagaacttggtcaggtggattatgtatttacagataagactggaacactcactgaaaacagcatggaattcattgaatgctgcatagatggccacaaatataaaggtgtaactcaagaggttgatggattatctcaaactgatggaactttaacatattttgacaaagtagataagaatcgagaagagctgtttctacgtgccttgtgtttatgtcatactgtagaaatcaaaacaaacgatgctgttgatggagctacagaatcagctgaattaacctatatctcctcttcaccagatgaaatagctttggtgaaaggagctaaaaggtacgggttcacatttttaggaaatcgaaatggatatatgagagtagagaaccaaagaaaagaaatagaagaatatgaacttcttcacaccttaaactttgatgctgtccggcgacgtatgagtgtaattgtgaagactcaagaaggagacatacttctcttttgtaaaggagcagactcggcagtttttcccagagtgcaaaatcatgaaattgagttaactaaagtccatgtggaacgtaatgcaatggatgggtatcggacactctgtgtagccttcaaagaaattgctccagatgattatgaaagaattaacagacagctcatagaggcaaaaatggccttacaagacagagaagaaaaaatggaaaaagttttcgatgatattgagacaaacatgaatttaattggagccactgcagttgaagacaagctacaagatcaagctgcagagaccattgaagctctgcatgcagcaggcctgaaagtctgggtgctcactggggacaagatggagacagctaaatccacatgctatgcctgccgccttttccagaccaacactgagctcttagaactaaccacaaaaaccattgaagaaagtgaaaggaaagaagatcgattacatgaattattgatagaatatcgcaagaaattgctgcatgagtttcctaaaagtactagaagctttaaaaaagcatggacagaacatcaggaatatggattaatcatagatggctccacattgtcactcatactaaattctagtcaagactctagttcaaacaattacaaaagcattttcctacaaatatgtatgaagtgtactgcagtgctctgctgtcggatggcaccattacagaaagcccagattgtcagaatggtgaagaatttaaaaggcagcccaataactctgtcgataggtgatggtgccaatgatgttagtatgatcttggaatcccatgtgggaataggtattaaaggcaaagaaggtcgccaagcagctaggaatagcgattattctgttccaaagtttaaacacttaaagaaactgctgttggctcatggacatctatattatgtgagaatagcacaccttgtacagtacttcttctataagaacctttgtttcattttgccacagtttttgtaccagttcttctgtggattctcacaacagccactgtatgatgctgcttaccttacaatgtacaatatctgcttcacatccttgcccatcctggcctatagtctactggaacagcacatcaacattgacactctgacctcagatccccgattgtatatgaaaatttctggcaatgccatgctacagttgggccccttcttatattggacatttctggctgcctttgaagggacagtgttcttctttgggacttactttctttttcagactgcatccctagaagaaaatggaaaggtatacggaaactggacttttggaaccattgtttttacagtcttagtattcactgtaaccctgaagcttgccttggatacccgattctggacgtggataaatcactttgtgatttggggttctttagccttctatgtatttttctcattcttctggggaggaattatttggccttttctcaagcaacagagaatgtattttgtatttgcccaaatgctgtcttctgtatccacatggttggctataattcttctaatatttatcagcctgttccctgagattcttctgatagtattaaagaatgtaagaagaagaagtgccagggtaagaactagtctgagctgtagaagggcatctgactcattatccgccagaccttcagtcagacctcttcttttacgaacattctcagacgaatctaatgtattgtaacagaatccgaatcttgaactgcctatgttattgtcctacaagcatactgacagtggttacagctaaaaaagaaagcatgaagaaacaactacaaaaagttatcatctcaggatacttgatacgcaacacactaaaccactctcatgtctagagttcacaataaatgttcattaaaataccaaatgattctcttaagcatttaccattattgtaagtagcctttatggccaaagctgtaagtt

SEQ ID NO: 60 - protein, 1131 aa, Homo sapiens
MFRRSLNRFCAGEEKRVGTRTVFVGNHPVSETEAYIAQRFCDNRIVSSKYTLWNFLPKNLFEQFRRIANFYFLIIFLVQVTVDTPTSPVTSGLPLFFVITVTAIKQGYEDWLRHRADNEVNKSTVYIIENAKRVRKESEKIKVGDVVEVQADETFPCDLILLSSCTTDGTCYVTTASLDGESNCKTHYAVRDTIALCTAESIDTLRAAIECEQPQPDLYKFVGRINIYSNSLEAVARSLGPENLLLKGATLKNTEKIYGVAVYTGMETKMALNYQGKSQKRSAVEKSINAFLIVYLFILLTKAAVCTTLKYVWQSTPYNDEPWYNQKTQKERETLKVLKMFTDFLSFMVLFNFIIPVSMYVTVEMQKFLGSFFISWDKDFYDEEINEGALVNTSDLNEELGQVDYVFTDKTGTLTENSMEFIECCIDGHKYKGVTQEVDGLSQTDGTLTYFDKVDKNREELFLRALCLCHTVEIKTNDAVDGATESAELTYISSSPDEIALVKGAKRYGFTFLGNRNGYMRVENQRKEIEEYELLHTLNFDAVRRRMSVIVKTQEGDILLFCKGADSAVFPRVQNHEIELTKVHVERNAMDGYRTLCVAFKEIAPDDYERINRQLIEAKMALQDREEKMEKVFDDIETNMNLIGATAVEDKLQDQAAETIEALHAAGLKVWVLTGDKMETAKSTCYACRLFQTNTELLELTTKTIEESERKEDRLHELLIEYRKKLLHEFPKSTRSFKKAWTEHQEYGLIIDGSTLSLILNSSQDSSSNNYKSIFLQICMKCTAVLCCRMAPLQKAQIVRMVKNLKGSPITLSIGDGANDVSMILESHVGIGIKGKEGRQAARNSDYSVPKFKHLKKLLLAHGHLYYVRIAHLVQYFFYKNLCFILPQFLYQFFCGFSQQPLYDAAYLTMYNICFTSLPILAYSLLEQHINIDTLTSDPRLYMKISGNAMLQLGPFLYWTFLAAFEGTVFFFGTYFLFQTASLEENGKVYGNWTFGTIVFTVLVFTVTLKLALDTRFWTWINHFVIWGSLAFYVFFSFFWGGIIWPFLKQQRMYFVFAQMLSSVSTWLAIILLIFISLFPEILLIVLKNVRRRSARVRTSLSCRRASDSLSARPSVRPLLLRTFSDESNVL

SEQ ID NO: 61 - DNA, 992 bp, Homo sapiens
  CDS (21)..(953)
ctgtcttttgtttctcttgcatgcaaggccccatactgtggatcatggcaaatctgagccagccctccgaatttgtcctcttgggcttctcctcctttggtgagctgcaggcccttctgtatggccccttcctcatgctttatcttctcgccttcatgggaaacaccatcatcatagttatggtcatagctgacacccacctacatacacccatgtacttcttcctgggcaatttttccctgctggagatcttggtaaccatgactgcagtgcccaggatgctctcagacctgctggtcccccacaaagtcattaccttcactggctgcatggtccagttctacttccacttttccctggggtccacctccttcctcatcctgacagacatggcccttgatcgctttgtggccatctgccacccactgcgctatggcactctgatgagccgggctatgtgtgtccagctggctggggctgcctgggcagctcctttcctagccatggtacccactgtcctctcccgagctcatcttgattactgccatggcgacgtcatcaaccacttcttctgtgacaatgaacctctcctgcagttgtcatgctctgacactcgcctgttggaattctgggactttctgatggccttgacctttgtcctcagctccttcctggtgaccctcatctcctatggctacatagtgaccactgtgctgcggatcccctctgccagcagctgccagaaggctttctccacttgcgggtctcacctcacactggtcttcatcggctacagtagtaccatctttctgtatgtcaggcctggcaaagctcactctgtgcaagtcaggaaggtcgtggccttggtgacttcagttctcaccccctttctcaatccctttatccttaccttctgcaatcagacagttaaaacagtgctacaggggcagatgtagaggctgaaaggcctttgcaaggcacaatgatgagcc

SEQ ID NO: 62 - protein, 311 aa, Homo sapiens
MQGPILWIMANLSQPSEFVLLGFSSFGELQALLYGPFLMLYLLAFMGNTIIIVMVIADTHLHTPMYFFLGNFSLLEILVTMTAVPRMLSDLLVPHKVITFTGCMVQFYFHFSLGSTSFLILTDMALDRFVAICHPLRYGTLMSRAMCVQLAGAAWAAPFLAMVPTVLSRAHLDYCHGDVINHFFCDNEPLLQLSCSDTRLLEFWDFLMALTFVLSSFLVTLISYGYIVTTVLRIPSASSCQKAFSTCGSHLTLVFIGYSSTIFLYVRPGKAHSVQVRKVVALVTSVLTPFLNPFILTFCNQTVKTVLQGQM

SEQ ID NO: 63 - DNA, 964 bp, Homo sapiens
  CDS (19)..(957)
ggccccatactgtggatcatggcaaatctgagccagccctccgaatttgtcctcttgggcttctcctcctttggtgagctgcaggcccttctgtatggccccttcctcatgctttatcttctcgccttcatgggaaacaccatcatcatagttatggtcatagctgacacccacctacatacacccatgtacttcttcctgggcaatttttccctgctggagatcttggtaaccatgactgcagtgcccaggatgctctcagacctgttggtcccccacaaagtcattaccttcactggctgcatggtccagttctacttccacttttccctggggtccacctccttcctcatcctgacagacatggcccttgatcgctttgtggccatctgccacccactgcgctatggcactctgatgagccgggctatgtgtgtccagctggctggggctgcctgggcagctcctttcctagccatggtacccactgtcctctcccgagctcatcttgattactgccatggcgacgtcatcaaccacttcttctgtgacaatgaacctctcctgcagttgtcatgctctgacactcgcctgttggaattctgggactttctgatggccttgacctttgtcctcagctccttcctggtgaccctcatctcctatggctacatagtgaccactgtgctgcggatcccctctgccagcagctgccagaaggctttctccacttgcgggtctcacctcacactggtcttcatcggctacagtagtaccatctttctgtatgtcaggcctggcaaagctcactctgtgcaagtcaggaaggtcgtggccttggtgacttcagttctcaccccctttctcaatccctttatccttaccttctgcaatcagacagttaaaacagtgctacaggggcagatgcagaggctgaaaggcctttgcaaggcacaatgatgag

SEQ ID NO: 64 - protein, 313 aa, Homo sapiens
MANLSQPSEFVLLGFSSFGELQALLYGPFLMLYLLAFMGNTIIIVMVIADTHLHTPMYFFLGNFSLLEILVTMTAVPRMLSDLLVPHKVITFTGCMVQFYFHFSLGSTSFLILTDMALDRFVAICHPLRYGTLMSRAMCVQLAGAAWAAPFLAMVPTVLSRAHLDYCHGDVINHFFCDNEPLLQLSCSDTRLLEFWDFLMALTFVLSSFLVTLISYGYIVTTVLRIPSASSCQKAFSTCGSHLTLVFIGYSSTIFLYVRPGKAHSVQVRKVVALVTSVLTPFLNPFILTFCNQTVKTVLQGQMQRLKGLCKAQ

SEQ ID NO: 65 - DNA, 964 bp, Homo sapiens
  CDS (2)..(964)
caccaagcttcccaccatggcaaatctgagccagccctccgaatttgtcctcttgggcttctcctcctttggtgagctgcaggcccttctgtatggccccttcctcatgctttatcttctcgccttcatgggaaacaccatcatcatagttatggtcatagctgacacccacctacatacacccatgtacttcttcctgggcaatttttccctgctggagatcttggtaaccatgactgcagtgcccaggatgctctcagacctgttggtcccccacaaagtcattaccttcactggctgcatggtccagttctacttccacttttccctggggtccacctccttcctcatcctgacagacatggcccttgatcgctttgtggccatctgccacccactgcgctatggcactctgatgagccgggctatgtgtgtccagctggctggggctgcctgggcagctcctttcctagccatggtacccactgtcctctcccgagctcatcttgattactgccatggcgacgtcatcaaccacttcttctgtgacaatgaacctctcctgcagttgtcatgctctgacactcgcctgttggaattctgggactttctgatggccttgacctttgtcctcagctccttcctggtgaccctcatctcctatggctacatagtgaccactgtgctgcggatcccctctgccagcagctgccagaaggctttctccacttgcgggtctcacctcacactggtcttcatcggctacagtagtaccatctttctgtatgtcaggcctggcaaagctcactctgtgcaagtcaggaaggtcgtggccttggtgacttcagttctcaccccctttctcaatccctttatccttaccttctgcaatcagacagttaaaacagtgctacaggggcagatgcagaggctgaaaggcctttgcaaggcacaactcgagggc

SEQ ID NO: 66 - protein, 321 aa, Homo sapiens
TKLPTMANLSQPSEFVLLGFSSFGELQALLYGPFLMLYLLAFMGNTIIIVMVIADTHLHTPMYFFLGNFSLLEILVTMTAVPRMLSDLLVPHKVITFTGCMVQFYFHFSLGSTSFLILTDMALDRFVAICHPLRYGTLMSRAMCVQLAGAAWAAPFLAMVPTVLSRAHLDYCHGDVINHFFCDNEPLLQLSCSDTRLLEFWDFLMALTFVLSSFLVTLISYGYIVTTVLRIPSASSCQKAFSTCGSHLTLVFIGYSSTIFLYVRPGKAHSVQVRKVVALVTSVLTPFLNPFILTFCNQTVKTVLQGQMQRLKGLCKAQLEG

SEQ ID NO: 67 - DNA, 769 bp, Homo sapiens
  CDS (2)..(769)
caccaagcttggaaacaccatcatcatagttatggtcatagctgacacccacctacatacacccatgtacttcttcctgggcaatttttccctgctggagatcttggtaaccatgactgcagtgcccaggatgctctcagacctgttggtcccccacaaagtcattaccttcactggctgcatggtccagttctacttccacttttccctggggtccacctccttcctcatcctgacagacatggcccttgatcgctttgtggccatctgccacccactgcgctatggcactctgatgagccgggctatgtgtgtccagctggctggggctgcctgggcagctcctttcctagccatggtacccactgtcctctcccgagctcatcttgattactgccatggcgacgtcatcaaccacttcttctgtgacaatgaacctctcctgcagttgtcatgctctgacactcgcctgttggaattctgggactttctgatggccttgacctttgtcctcagctccttcctggtgaccctcatctcctatggctacatagtgaccactgtgctgcggatcccctctgccagcagctgccagaaggctttctccacttgcgggtctcacctcacactggtcttcatcggctacagtagtaccatctttctgtatgtcaggcctggcaaagctcactctgtgcaagtcaggaaggtcgtggccttggtgacttcagttctcaccccctttctcaatccctttatccttctcgagggc

SEQ ID NO: 68 - protein, 256 aa, Homo sapiens
TKLGNTIIIVMVIADTHLHTPMYFFLGNFSLLEILVTMTAVPRMLSDLLVPHKVITFTGCMVQFYFHFSLGSTSFLILTDMALDRFVAICHPLRYGTLMSRAMCVQLAGAAWAAPFLAMVPTVLSRAHLDYCHGDVINHFFCDNEPLLQLSCSDTRLLEFWDFLMALTFVLSSFLVTLISYGYIVTTVLRIPSASSCQKAFSTCGSHLTLVFIGYSSTIFLYVRPGKAHSVQVRKVVALVTSVLTPFLNPFILLEG

SEQ ID NO: 69 - DNA, 992 bp, Homo sapiens; identical to SEQ ID NO: 61
  CDS (21)..(953)

SEQ ID NO: 70 - protein, 311 aa, Homo sapiens; identical to SEQ ID NO: 62

SEQ ID NO: 71 - DNA, 992 bp, Homo sapiens
  CDS (21)..(953)
ctgtcttttgtttctcttgcatgcaaggccccatactgtggatcatggcaaatctgagccagccctccgaatttgtcctcttgggcttctcctcctttggtgagctgcaggcccttctgtatggccccttcctcatgctttatcttctcgccttcatgggaaacaccatcatcatagttatggtcatagctgacacccacctacatacacccatgtacttcttcctgggcaatttttccctgctggagatcttggtaaccatgactgcagtgcccaggatgctctcagacctgttggtcccccacaaagtcattaccttcactggctgcatggtccagttctacttccacttttccctggggtccacctccttcctcatcctgacagacatggcccttgatcgctttgtggccatctgccacccactgcgctatggcactctgatgagccgggctatgtgtgtccagctggctggggctgcctgggcagctcctttcctagccatggtacccactgtcctctcccgagctcatcttgattactgccatggcgacgtcattaaccacttcttctgtgacaatgaacctctcctgcagttgtcatgctctgacactcgcctgttggaattctgggactttctgatggtcttgacctttgtcctcagctccttcctggtgaccctcatctcctatggctacatagtgaccactgtgctgcggatcccctctgccagcagctgccagaaggctttctccacttgcgggtctcacctcacactggtcttcatcggctacagtagtaccatctttctgtatgtcaggcctggcaaagctcactctgtgcaagtcaggaaggtcgtggccttggtgacttcagttctcaccccctttctcaatccctttatccttaccttctgcaatcagacagttaaaacagtgctacaggggcagatgtagaggctgaaaggcctttgcaaggcacaatgatgagcc

SEQ ID NO: 72 - protein, 311 aa, Homo sapiens
MQGPILWIMANLSQPSEFVLLGFSSFGELQALLYGPFLMLYLLAFMGNTIIIVMVIADTHLHTPMYFFLGNFSLLEILVTMTAVPRMLSDLLVPHKVITFTGCMVQFYFHFSLGSTSFLILTDMALDRFVAICHPLRYGTLMSRAMCVQLAGAAWAAPFLAMVPTVLSRAHLDYCHGDVINHFFCDNEPLLQLSCSDTRLLEFWDFLMVLTFVLSSFLVTLISYGYIVTTVLRIPSASSCQKAFSTCGSHLTLVFIGYSSTIFLYVRPGKAHSVQVRKVVALVTSVLTPFLNPFILTFCNQTVKTVLQGQM

SEQ ID NO: 73 - DNA, 1113 bp, Homo sapiens
  CDS (3)..(1112)
atgaattaaactcaatggtgatggtggtgatgaccggtacgcgtagaatcgagaccgaggagagggttagggataggcttaccctcgacgatggacttccaccgggccccaagcctgggagcctgcccgccacgcacgacccccgggctcgaggggggcgaaaagcccaggttgtcgcgggcgcacctctccagcttgtgcacgtggcagaagacagaggcggagcccacggagcgggccgggcggcggggcagccagaggccacggctctcgggcgcccccggggggcgcgggctgggggtgcgggcagcgcgctcgggccagtcggcgctggcaacgaggaagcgcaggaccaccaggttgaggaaggcgccaatgaccgtgagccccaggaggatgtagaggaagctgaaggccacgtaggggagcttcctctgcagcgcctcgccgctctgcagtgccacgaagtcgccgaagccgatggtggtgagggtgatgaagcagtagtagtaggcgtggaagaaggtccagccctcgaagtgcgagaaggcgacggccccgagggccagggtggcggcacacgccagcagcccggccaccaccaggttctccgtggacacgcacgtccaccgcaggcccaggcagcacttggccgccaacaggaggcgccgcaccaccgcgttcagccgttcgcccaggctctggaaagtgaccagcgtcagcgggatgcccaggagcgcgtagaacatgcagaagaccttgccggagtccgtacccggcgcggcgtggccgtactcgatggtagtgatgacggtgatggcgaagtagaaggagccggggaacttccactggcggccggcgcggtggggctcagcctggagcgccaggcgctccagctcgcggtagtcctcggccgagaagccgaacttcctccggagagcgccccgcttctggaccagcagtcgctggcggccgctttccgcctcggactcgagcgcgtcgaagacagcagcgcccaccagcaggtaacacagggtgcacaggaccagcccggccgcgcgcacgctcggcctccgcatggtggatcctcgcgaagatcttctgaaaagcttc

SEQ ID NO: 74 - protein, 370 aa, Homo sapiens
ELNSMVMVVMTGTRRIETEERVRDRLTLDDGLPPGPKPGSLPATHDPRARGGRKAQVVAGAPLQLVHVAEDRGGAHGAGRAAGQPEATALGRPRGARAGGAGSALGPVGAGNEEAQDHQVEEGANDREPQEDVEEAEGHVGELPLQRLAALQCHEVAEADGGEGDEAVVVGVEEGPALEVREGDGPEGQGGGTRQQPGHHQVLRGHARPPQAQAALGRQQEAPHHRVQPFAQALESDQRQRDAQERVEHAEDLAGVRTRRGVAVLDGSDDGDGEVEGAGELPLAAGAVGLSLERQALQLAVVLGREAELPPESAPLLDQQSLAAAFRLGLERVEDSSAHQQVTQGAQDQPGRAHARPPHGGSSRRSSEKL

SEQ ID NO: 75 - DNA, 1216 bp, Homo sapiens
  CDS (1)..(990)
atgcggaggccgagcgtgcgcgcggccgggctggtcctgtgcaccctgtgttacctgctggtgggcgctgctgtcttcgacgcgctcgagtccgaggcggaaagcggccgccagcgactgctggtccagaagcggggcgctctccggaggaagttcggcttctcggccgaggactaccgcgagctggagcgcctggcgctccaggctgagccccaccgcgccggccgccagtggaagttccccggctccttctacttcgccatcaccgtcatcactaccatcgagtacggccacgccgcgccgggtacggactccggcaaggtcttctgcatgttctacgcgctcctgggcatcccgctgacgctggtcactttccagagcctgggcgaacggctgaacgcggtggtgcggcgcctcctgttggcggccaagtgctgcctgggcctgcggtggacgtgcgtgtccacggagaacctggtggtggccgggctgctggcgtgtgccgccaccctggccctcggggccgtcgccttctcgcacttcgagggctggaccttcttccacgcctactactactgcttcatcaccctcaccaccatcggcttcggcgacttcgtggcactgcagagcggcgaggcgctgcagaggaagctcccctacgtggccttcagcttcctctacatcctcctggggctcacggtcattggcgccttcctcaacctggtggtcctgcgcttcctcgttgccagcgccgactggcccgagcgcgctgcccgcacccccagcccgcgccccccgggggcgcccgagagccgtggcctctggctgccccgccgcccggcccgctccgtgggctccgcctctgtcttctgccacgtgcacaagctggagaggtgcgcccgcgacaacctgggcttttcgcccccctcgagcccgggggtcgtgcgtggcgggcaggctcccaggcttggggcccggtggaagtccatctgacaaccccacccaggccagggtcgaatctggaatgggagggtctggcttcagctatcagggcaccctccccagggattggaaacggatgacgggcctttaggcggttttttgccacgagcagtttttcattactgtctgtggctaagtcccctccctcctttccaaaaatatattacagtcaccccataagcccaaaaaaaaaaaaaaaaaaaaaaaaaaaaaa

SEQ ID NO: 76 - protein, 330 aa, Homo sapiens
MRRPSVRAAGLVLCTLCYLLVGAAVFDALESEAESGRQRLLVQKRGALRRKFGFSAEDYRELERLALQAEPHRAGRQWKFPGSFYFAITVITTIEYGHAAPGTDSGKVFCMFYALLGIPLTLVTFQSLGERLNAVVRRLLLAAKCCLGLRWTCVSTENLVVAGLLACAATLALGAVAFSHFEGWTFFHAYYYCFITLTTIGFGDFVALQSGEALQRKLPYVAFSFLYILLGLTVIGAFLNLVVLRFLVASADWPERAARTPSPRPPGAPESRGLWLPRRPARSVGSASVFCHVHKLERCARDNLGFSPPSSPGVVRGGQAPRLGARWKSI

SEQ ID NO: 77 - DNA, 1113 bp, Homo sapiens; identical to SEQ ID NO: 73
  CDS (3)..(1112)

SEQ ID NO: 78 - protein, 370 aa, Homo sapiens; identical to SEQ ID NO: 74

SEQ ID NO: 79 - DNA, 265 bp, Homo sapiens
gccgtcgacggagtccgtacccggcgcggcgtggccgtacccgatggtagtgatgacggtgatggcgaagtagaaggagccggggaacttccactggcggccggcgcggtggggctcagcctggagcgccaggcgctccagctcgcggtagtcctcggccgagaagccgaacttcctccggagagcgccccgcttctggaccagcagtcgctggcggccgctttccgcctcggactcgagcgcgtcgaagacagcggatccggtg

SEQ ID NO: 80 - protein, 89 aa, Homo sapiens
  misc_feature (89)..(89): Wherein Xaa may be any naturally occurring amino acid
AVDGVRTRRGVAVPDGSDDGDGEVEGAGELPLAAGAVGLSLERQALQLAVVLGREAELPPESAPLLDQQSLAAAFRLGLERVEDSGSGX

SEQ ID NO: 81 - DNA, 265 bp, Homo sapiens
gccgtcgacggagtccgtacccggcgcggcgtggccgtactcgatggtagtgatgacggtgatggcgaagtagaaggagccggggaacttccactggcggccggcgcggtggggctcagcctggagcgccaggcgctccagctcgcggtagtcctcggccgagaagccgaacttcctccggagagcgccccgcttctggaccagcagtcgctggcggccgctttccgcctcggactcgagcgcgtcgaagacagcggatccggtg

SEQ ID NO: 82 - protein, 89 aa, Homo sapiens
  misc_feature (89)..(89): Wherein Xaa may be any naturally occurring amino acid
AVDGVRTRRGVAVLDGSDDGDGEVEGAGELPLAAGAVGLSLERQALQLAVVLGREAELPPESAPLLDQQSLAAAFRLGLERVEDSGSGX

SEQ ID NO: 83 - DNA, 1113 bp, Homo sapiens; identical to SEQ ID NO: 73

SEQ ID NO: 84 - protein, 371 aa, Homo sapiens
  misc_feature (371)..(371): Wherein Xaa may be any naturally occurring amino acid
ELNSMVMVVMTGTRRIETEERVRDRLTLDDGLPPGPKPGSLPATHDPRARGGRKAQVVAGAPLQLVHVAEDRGGAHGAGRAAGQPEATALGRPRGARAGGAGSALGPVGAGNEEAQDHQVEEGANDREPQEDVEEAEGHVGELPLQRLAALQCHEVAEADGGEGDEAVVVGVEEGPALEVREGDGPEGQGGGTRQQPGHHQVLRGHARPPQAQAALGRQQEAPHHRVQPFAQALESDQRQRDAQERVEHAEDLAGVRTRRGVAVLDGSDDGDGEVEGAGELPLAAGAVGLSLERQALQLAVVLGREAELPPESAPLLDQQSLAAAFRLGLERVEDSSAHQQVTQGAQDQPGRAHARPPHGGSSRRSSEKLX

SEQ ID NO: 85 - DNA, 265 bp, Homo sapiens
  CDS (11)..(265)
caccggatccgctgtcttcgacgcgctcgagtccgaggcggaaagcggccgccagcgactgctggtccagaagcggggcgctctccggaggaagttcggcttctcggccgaggactaccgcgagctggagcgcctggcgctccaggctgagccccaccgcgccggccgccagtggaagttccccggctccttctacttcgccatcaccgtcatcactaccatcgggtacggccacgccgcgccgggtacggactccgtcgacggc

SEQ ID NO: 86 - protein, 85 aa, Homo sapiens
AVFDALESEAESGRQRLLVQKRGALRRKFGFSAEDYRELERLALQAEPHRAGRQWKFPGSFYFAITVITTIGYGHAAPGTDSVDG

SEQ ID NO: 87 - DNA, 953 bp, Homo sapiens
  CDS (8)..(949)
ctctgccatgatcattttcaacctgagcagttacaatccaggacccttcattctggtagggatcccaggcctggagcaattccatgtgtggattggaattcccttctgtatcatctacattgtagctgttgtgggaaactgcatccttctctacctcattgtggtggagcatagtcttcatgaacccatgttcttctttctctccatgctggccatgactgacctcatcttgtccacagctggtgtgcctaaaacactcagtatcttttggctaggggctcgcgaaatcacattcccaggatgccttacacaaatgttcttccttcactataactttgtcctggattcagccattctgatggccatggcatttgatcactatgtagctatctgttctcccttgagatataccaccatcttgactcccaagaccatcatcaagagtgctatgggcatctcctttcgaagcttctgcatcatcctgccagatgtattcttgctgacatgcctgcctttctgcaggacacgcatcataccccacacatactgtgagcatatgggtgttgcccagctcgcctgtgctgatatctccatcaacttctggtatggcttttgtgttcccatcatgacagtcatctcagatgtgattctcattgctgtttcctacgcacacatcctctgtgctgtcttttgccttccctcccaagatgcccgccagaaggccctcggcacttgtggttctcatgtctgtgtcatcctcatgttttatacacctgcctttttctccatcctcgcccatcgctttggacacaatgtctctcgcaccttccacatcatgtttgccaatctctacattgttatcccacctgcactcaaccccatggtttacggagtgaagaccaagcagatcagagataaggttatacttttgttttctaagggtacaggatgat

SEQ ID NO: 88 - protein, 314 aa, Homo sapiens
MIIFNLSSYNPGPFILVGIPGLEQFHVWIGIPFCIIYIVAVVGNCILLYLIVVEHSLHEPMFFFLSMLAMTDLILSTAGVPKTLSIFWLGAREITFPGCLTQMFFLHYNFVLDSAILMAMAFDHYVAICSPLRYTTILTPKTIIKSAMGISFRSFCIILPDVFLLTCLPFCRTRIIPHTYCEHMGVAQLACADISINFWYGFCVPIMTVISDVILIAVSYAHILCAVFCLPSQDARQKALGTCGSHVCVILMFYTPAFFSILAHRFGHNVSRTFHIMFANLYIVIPPALNPMVYGVKTKQIRDKVILLFSKGTG

SEQ ID NO: 89 - DNA, 938 bp, Homo sapiens
  CDS (4)..(933)
taaatgatggacaaccactctagtgccactgaattccaccttctaggcttccctgggtcccaaggactacaccacattctttttgctatattctttttcttctatttagtgacattaatgggaaacacggtcatcattgtgattgtctgtgtggataaacgtctgcagtcccccatgtatttcttcctcagccacctctctaccctggagatcctggtcacaaccataattgtccccatgatgctttggggattgctcttcctgggatgcagacagtatctttctctacatgtatcgctcaacttttcctgtgggaccatggagtttgcattacttggagtgatggctgtggaccgttatgtggctgtgtgtaaccctttgaggtacaacatcattatgaacagcagtacctgtatttgggtggtaatagtgtcatgggtgtttggatttctttctgaaatctggcccatctatgccacatttcagtttaccttccgcaaatcaaattcattagaccatttttactgtgaccgagggcaattgctcaaactgtcctgcgataacactcttctcacagagtttatccttttcttaatggctgtttttattctcattggttctttgatccctacgattgtctcctacacctacattatctccaccatcctcaagatcccgtcagcctctggccggaggaaagccttctccacttttgcctcccacttcacctgtgttgtgattggctatggcagctgcttgtttctctacgtgaaacccaagcaaacacagggagttgagtacaataagatagtttccctgttggtttctgtgttaacccccttcctgaatcctttcatctttactcttcggaatgacaaagtcaaagaggccctccgagatgggatgaaacgctgctgtcaactcctgaaagattagct

SEQ ID NO: 90 - protein, 310 aa, Homo sapiens
MMDNHSSATEFHLLGFPGSQGLHHILFAIFFFFYLVTLMGNTVIIVIVCVDKRLQSPMYFFLSHLSTLEILVTTIIVPMMLWGLLFLGCRQYLSLHVSLNFSCGTMEFALLGVMAVDRYVAVCNPLRYNIIMNSSTCIWVVIVSWVFGFLSEIWPIYATFQFTFRKSNSLDHFYCDRGQLLKLSCDNTLLTEFILFLMAVFILIGSLIPTIVSYTYIISTILKIPSASGRRKAFSTFASHFTCVVIGYGSCLFLYVKPKQTQGVEYNKIVSLLVSVLTPFLNPFIFTLRNDKVKEALRDGMKRCCQLLKD

SEQ ID NO: 91 - DNA, 952 bp, Homo sapiens
  CDS (2)..(952)
caccggatccaccaatgaggacaaccactctagtgccactgaattccaccttctaggcttccctgggtcccaaggactacaccacattctttttgctatattctttttcttctatttagtgacattaatgggaaacacggtcatcattgtgattgtctgtgtggataaacgtctgcagtcccccatgtatttcttcctcagccacctctctaccctggagatcctggtcacaaccataattgtccccatgatgctttggggattgctcttcctgggatgcagacagtatctttctctacatgtatcgctcaacttttcctgtgggaccatggagtttgcattacttggagtgatggctgtggaccgttatgtggctgtgtgtaaccctttgaggtacaacatcattatgaacagcagtacctgtatttgggtggtaatagtgtcatgggtgtttggatttctttctgaaatctggcccatctatgccacatttcagtttaccttccgcaaatcaaattcattagaccatttttactgtgaccgagggcaattgctcaaactgtcctgcgataacactcttctcacagagtttatccttttcttaatggctgtttttattctcattggttctttgatccctacgattgtctcctacacctacattatctccaccatcctcaagatcccgtcagcctctggccggaggaaagccttctccacttttgcctcccacttcacctgtgttgtgattggctatggcagctgcttgtttctctacgtgaaacccaagcaaacacagggagttgagtacaataagatagtttccctgttggtttctgtgttaacccccttcctgaatcctttcatctttactcttcggaatgacaaagtcaaagaggccctccgagatgggatgaaacgctgctgtcaactcctgaaagatctcgagggc

SEQ ID NO: 92 - protein, 317 aa, Homo sapiens
TGSTNEDNHSSATEFHLLGFPGSQGLHHILFAIFFFFYLVTLMGNTVIIVIVCVDKRLQSPMYFFLSHLSTLEILVTTIIVPMMLWGLLFLGCRQYLSLHVSLNFSCGTMEFALLGVMAVDRYVAVCNPLRYNIIMNSSTCIWVVIVSWVFGFLSEIWPIYATFQFTFRKSNSLDHFYCDRGQLLKLSCDNTLLTEFILFLMAVFILIGSLIPTIVSYTYIISTILKIPSASGRRKAFSTFASHFTCVVIGYGSCLFLYVKPKQTQGVEYNKIVSLLVSVLTPFLNPFIFTLRNDKVKEALRDGMKRCCQLLKDLEG

SEQ ID NO: 93 - DNA, 829 bp, Homo sapiens
  CDS (2)..(829)
caccggatccaacacggtcatcattgtgattgtctgtgtggataaacgtctgcagtcccccatgtatttcttcctcagccacctctctaccctggagatcctggtcacaaccataattgtccccatgatgctttggggattgctcttcctgggatgcagacagtatctttctctacatgtatcgctcaacttttcctgtgggaccatggagtttgcattacttggagtgatggctgtggaccgttatgtggctgtgtgtaaccctttgaggtacaacatcattatgaacagcagtacctgtatttgggtggtaatagtgtcatgggtgtttggatttctttctgaaatctggcccatctatgccacatttcagtttaccttccgcaaatcaaattcattagaccatttttactgtgaccgagggcaattgctcaaactgtcctgcgataacactcttctcacagagtttatccttttcttaatggctgtttttattctcattggttctttgatccctacgattgtctcctacacctacattatctccaccatcctcaagatcccgtcagcctctggccggaggaaagccttctccacttttgcctcccacttcacctgtgttgtgattggctatggcagctgcttgtttctctacgtgaaacccaagcaaacacagggagttgagtacaataagatagtttccctgttggtttctgtgttaacccccttcctgaatcctttcatctttactcttcggaatgacaaagtcaaagaggccctccgagatgggatgaaacgctgctgtcaactcctgaaagatctcgagggc

SEQ ID NO: 94 - protein, 276 aa, Homo sapiens
TGSNTVIIVIVCVDKRLQSPMYFFLSHLSTLEILVTTIIVPMMLWGLLFLGCRQYLSLHVSLNFSCGTMEFALLGVMAVDRYVAVCNPLRYNIIMNSSTCIWVVIVSWVFGFLSEIWPIYATFQFTFRKSNSLDHFYCDRGQLLKLSCDNTLLTEFILFLMAVFILIGSLIPTIVSYTYIISTILKIPSASGRRKAFSTFASHFTCVVIGYGSCLFLYVKPKQTQGVEYNKIVSLLVSVLTPFLNPFIFTLRNDKVKEALRDGMKRCCQLLKDLEG

SEQ ID NO: 95 - DNA, 953 bp, Homo sapiens
  CDS (8)..(949)
ctctgccatgatcattttcaacctgagcagttacaatccaggacccttcattctggtagggatcccaggcctggagcaattccatgtgtggattggaattcccttctgtatcatctacattgtagctgttgtgggaaactgcatccttctctacctcattgtggtggagcatagtcttcatgaacccatgttcttctttctctccatgctggccatgactgacctcatcttgtccacagctggtgtgcctaaaacactcagtatcttttggctaggggctcgcgaaatcacattcccaggatgccttacacaaatgttcttccttcactataactttgtcctggattcagccattctgatggccatggcatttgatcgctatgtagctatctgttctcccttgagatataccaccatcttgactcccaagaccatcatcaagagtgctatgggcatctcctttcgaagcttctgcatcatcctgccagatgtattcttgctgacatgcctgcctttctgcaggacacgcatcataccccacacatactgtgagcatataggtgttgcccagctcgcctgtgctgatatctccatcaacttctggtatggcttttgtgttcccatcatgacagtcatctcagatgtgattctcattgctgtttcctacgcacacatcctctgtgctgtcttttgccttccctcccaagatgcccgccagaaagccctcggcacttgtggttctcatgtctgtgtcatcctcatgttttatacacctgcctttttctccatcctcgcccatcgctttggacacaatgtctctcgcaccttccacatcatgtttgccaatctctacattgttatcccacctgcactcaaccccatggtttacggagtgaagaccaagcagatcagagataaggttatacttttgttttctaagggtacaggatgat

SEQ ID NO: 96 - protein, 314 aa, Homo sapiens
MIIFNLSSYNPGPFILVGIPGLEQFHVWIGIPFCIIYIVAVVGNCILLYLIVVEHSLHEPMFFFLSMLAMTDLILSTAGVPKTLSIFWLGAREITFPGCLTQMFFLHYNFVLDSAILMAMAFDRYVAICSPLRYTTILTPKTIIKSAMGISFRSFCIILPDVFLLTCLPFCRTRIIPHTYCEHIGVAQLACADISINFWYGFCVPIMTVISDVILIAVSYAHILCAVFCLPSQDARQKALGTCGSHVCVILMFYTPAFFSILAHRFGHNVSRTFHIMFANLYIVIPPALNPMVYGVKTKQIRDKVILLFSKGTG

SEQ ID NO: 97 - DNA, 953 bp, Homo sapiens
  CDS (8)..(949)
ctctgccatgatcattttcaacctgagcagttacaatccaggacccttcattctggtagggatcccaggcctggagcaattccatgtgtggattggaattcccttctgtatcatctacattgtagctgttgtgggaaactgcatccttctctacctcattgtggtggagcatagtcttcatgaacccatgttcttctttctctccatgctggccatgactgacctcatcttgtccacagctggtgtgcctaaaacactcagtatcttttggctaggggctcgcgaaatcacattcccaggatgccttacacaaatgttcttccttcactataactttgtcctggattcagccattctgatggccatggcatttgatcgctatgtagctatctgttctcccttgagatataccaccatcttgactcccaagaccatcatcaagagtgctatgggcatctcctttcgaagcttctgcatcatcctgccagatgtattcttgctgacatgcctgcctttctgcaggacacgcatcataccccacacatactgtgagcatataggtgttgcccggctcgcctgtgctgatatctccatcaacttctggtatggcttttgtgttcccatcatgacagtcatctcagatgtgattctcattgctgtttcctacgcacacatcctctgtgctgtcttttgccttccctcccaagatgcccgccagaaagccctcggcacttgtggttctcatgtctgtgtcatcctcatgttttatacacctgcctttttctccatcctcgcccatcgctttggacacaatgtctctcgcaccttccacatcatgtttgccaatctctacattgttatcccacctgcactcaaccccatggtttacggagtgaagaccaagcagatcagagataaggttatacttttgttttctaagggtacaggatgat

SEQ ID NO: 98 - protein, 314 aa, Homo sapiens
MIIFNLSSYNPGPFILVGIPGLEQFHVWIGIPFCIIYIVAVVGNCILLYLIVVEHSLHEPMFFFLSMLAMTDLILSTAGVPKTLSIFWLGAREITFPGCLTQMFFLHYNFVLDSAILMAMAFDRYVAICSPLRYTTILTPKTIIKSAMGISFRSFCIILPDVFLLTCLPFCRTRIIPHTYCEHIGVARLACADISINFWYGFCVPIMTVISDVILIAVSYAHILCAVFCLPSQDARQKALGTCGSHVCVILMFYTPAFFSILAHRFGHNVSRTFHIMFANLYIVIPPALNPMVYGVKTKQIRDKVILLFSKGTG

SEQ ID NO: 99 - DNA, 1217 bp, Homo sapiens
  CDS (3)..(1214)
ggcccctgggatccatgctggcccggaggaagccggtgctgccggcgctcaccatcaaccctaccatcgccgagggcccatcccctaccagcgagggcgcctccgaggcaaacctggtggacctgcagaagaagctggaggagctggaacttgacgagcagcagaagaagcggctggaagcctttctcacccagaaagccaaggtcggcgaactcaaagacgatgacttcgaaaggatctcagagctgggcgcgggcaacggcggggtggtcaccaaagtccagcacagaccctcgggcctcatcatggccaggaagctgatccaccttgagatcaagccggccatccggaaccagatcatccgcgagctgcaggtcctgcacgaatgcaactcgccgtacatcgtgggcttctacggggccttctacagtgacggggagatcagcatttgcatggaacacatggacggcggctccctggaccaggtgctgaaagaggccaagaggattcccgaggagatcctggggaaagtcagcatcgcggttctccggggcttggcgtacctccgagagaagcaccagatcatgcaccgagatgtgaagccctccaacatcctcgtgaactctagaggggagatcaagctgtgtgacttcggggtgagcggccagctcatagactccatggccaactccttcgtgggcacgcgctcctacatggctccggagcggttgcagggcacacattactcggtgcagtcggacatctggagcatgggcttgtccctggtggagctggccgtcggaaggtaccccatccccccgcccgacgccaaagagctggaggccatctttggccggcccgtggtcgacggggaagaaggagagcctcacagcatctcgcctcggccgaggccccccgggcgccccgtcagcggtcacgggatggatagccggcctgccatggccatctttgaactcctggactatattgtgaacgagccacctcctaagctgcccaacggtgtgttcacccccgacttccaggagtttgtcaataaatgcctcatcaagaacccagcggagcgggcggacctgaagatgctcacaaaccacaccttcatcaagcggtccgaggtggaagaagtggattttgccggctggttgtgtaaaaccctgcggctgaaccagcccggcacacccacgcgcaccgccgtgtga

SEQ ID NO: 100 - protein, 404 aa, Homo sapiens
PLGSMLARRKPVLPALTINPTIAEGPSPTSEGASEANLVDLQKKLEELELDEQQKKRLEAFLTQKAKVGELKDDDFERISELGAGNGGVVTKVQHRPSGLIMARKLIHLEIKPAIRNQIIRELQVLHECNSPYIVGFYGAFYSDGEISICMEHMDGGSLDQVLKEAKRIPEEILGKVSIAVLRGLAYLREKHQIMHRDVKPSNILVNSRGEIKLCDFGVSGQLIDSMANSFVGTRSYMAPERLQGTHYSVQSDIWSMGLSLVELAVGRYPIPPPDAKELEAIFGRPVVDGEEGEPHSISPRPRPPGRPVSGHGMDSRPAMAIFELLDYIVNEPPPKLPNGVFTPDFQEFVNKCLIKNPAERADLKMLTNHTFIKRSEVEEVDFAGWLCKTLRLNQPGTPTRTAV

SEQ ID NO: 101 - DNA, 948 bp, Homo sapiens
  CDS (2)..(934)
caccggatccaccatgctggcccggaggaagccggtgctgccggcgctcaccatcaaccctaccatcgccgagggcccatcccctaccagcgagggcgcctccgaggcaaacctggtggacctgcagaagaagctggaggagctggaacttgacgagcagcagaagaagcggctggaagcctttctcacccagaaagccaaggttggcgaactcaaagacgatgacttcgaaaggatctcagagctgggcgcgggcaacggcggggtggtcaccaaagtccagcacagaccctcgggcctcatcatggccaggaagctgatccaccttgagatcaagccggccatccggaaccagatcatccgcgagctgcaggtcctgcacgaatgcaactcgccgtacatcgtgggcttctacggggccttctacagtgacggggagatcagcatttgcatggaacacatggacggcggctccctggaccaggtgctgaaagaggccaagaggattcccgaggagatcctggggaaagtcagcatcgcggttctccggggcttggcgtacctccgagagaagcaccagatcatgcaccgagatgtgaagccctccaacatcctcgtgaactctagaggggagatcaagctgtgtgacttcggggtgagcggccagctcatcgactccatggccaactccttcgtgggcacgcgctcctacatggctccacctcctaagctgcccaacggtgtgttcacccccgacttccaggagtttgtcaataaatgcctcatcaagaacccagcggagcgggcggacctgaagatgctcacaaaccacaccttcatcaagcggtccgaggtggaagaagtggattttgccggctggttgtgtaaaaccctgcggctgaaccagcccggcacacccacgcgcaccgccgtgtgagcggccgctat

SEQ ID NO: 102 - protein, 311 aa, Homo sapiens
TGSTMLARRKPVLPALTINPTIAEGPSPTSEGASEANLVDLQKKLEELELDEQQKKRLEAFLTQKAKVGELKDDDFERISELGAGNGGVVTKVQHRPSGLIMARKLIHLEIKPAIRNQIIRELQVLHECNSPYIVGFYGAFYSDGEISICMEHMDGGSLDQVLKEAKRIPEEILGKVSIAVLRGLAYLREKHQIMHRDVKPSNILVNSRGEIKLCDFGVSGQLIDSMANSFVGTRSYMAPPPKLPNGVFTPDFQEFVNKCLIKNPAERADLKMLTNHTFIKRSEVEEVDFAGWLCKTLRLNQPGTPTRTAV

SEQ ID NO: 103 - DNA, 1504 bp, Homo sapiens
  CDS (19)..(1218)
ccggcccgcggagccccgatgctggcccggaggaagccggtgctgccggcgctcaccatcaaccctaccatcgccgagggcccatcccctaccagcgagggcgcctccgaggcaaacctggtggacctgcagaagaagctggaggagctggaacttgacgagcagcagaagaagcggctggaagcctttctcacccagaaagccaaggtcggcgaactcaaagacgatgacttcgaaaggatctcagagctgggcgcgggcaacggcggggtggtcaccaaagtccagcacagaccctcgggcctcatcatggccaggaagctgatccaccttgagatcaagccggccatccggaaccagatcatccgcgagctgcaggtcctgcacgaatgcaactcgccgtacatcgtgggcttctacggggccttctacagtgacggggagatcagcatttgcatggaacacatggacggcggctccctggaccatctgctgaaagaggccaagaggattcccgaggagatcctggggaaagtcagcatcgcggttctccggggcttggcgtacctccgagagaagcaccagatcatgcaccgagatgtgaagccctccaacatcctcgtgaactctagaggggagatcaagctgtgtgacttcggggtgagcggccagctcatcgactccatggccaactccttcgtgggcacgcgctcctacatggctccggagcggttgcagggcacacattactcggtgcagtcggacatctggagcatgggcctgtccctggtggagctggccgtcggaaggtaccccatccccccgcccgacgccaaagagctggaggccatctttggccggcccgtggtcgacggggaagaaggagagcctcacagcatctcgcctcggccgaggccccccgggcgccccgtcagcggtcacgggatggatagccggcctgccatggccatctttgaactcctggactatattgtgaacgagccacctcctaagctgcccaacggtgtgttcacccccgacttccaggagtttgtcaataaatgcctcatcaagaacccagcggagcgggcggacctgaagatgctcacaaaccacaccttcatcaagcggtccgaggtggaagaagtggattttgccggctggttgtgtaaaaccctgcggctgaaccagcccggcacacccacgcgcaccgccgtgtgacagtggccgggctccctgcgtcccgctggtgacctgcccaccgtccctgtccatgccccgcccttccagctgaggacaggctggcgcctccacccaccctcctgcctcacccctgcggagagcaccgtggcggggcgacagcgcatgcaggaacgggggtctcctctcctgcccgtcctggccggggtgcctctggggacgggcgacgctgctgtgtgtggtctcagaggctctgcttccttaggttacaaaacaaaacagggagagaaaaagcaaaaaaaaa

SEQ ID NO: 104 - protein, 400 aa, Homo sapiens
MLARRKPVLPALTINPTIAEGPSPTSEGASEANLVDLQKKLEELELDEQQKKRLEAFLTQKAKVGELKDDDFERISELGAGNGGVVTKVQHRPSGLIMARKLIHLEIKPAIRNQIIRELQVLHECNSPYIVGFYGAFYSDGEISICMEHMDGGSLDHLLKEAKRIPEEILGKVSIAVLRGLAYLREKHQIMHRDVKPSNILVNSRGEIKLCDFGVSGQLIDSMANSFVGTRSYMAPERLQGTHYSVQSDIWSMGLSLVELAVGRYPIPPPDAKELEAIFGRPVVDGEEGEPHSISPRPRPPGRPVSGHGMDSRPAMAIFELLDYIVNEPPPKLPNGVFTPDFQEFVNKCLIKNPAERADLKMLTNHTFIKRSEVEEVDFAGWLCKTLRLNQPGTPTRTAV

SEQ ID NO: 105 - DNA, 1227 bp, Homo sapiens
  CDS (2)..(1213)
caccggatccaccatgctggcccggaggaagccggtgctgccggcgctcaccatcaaccctaccatcgccgagggcccatcccctaccagcgagggcgcctccgaggcaaacctggtggacctgcagaagaagctggaggagctggaacttgacgagcagcagaagaagcggctggaagcctttctcacccagaaagccaaggtcggcgaactcaaagacgatgacttcgaaaggatctcagagctgggcgcgggcaacggcggggtggtcaccaaagtccagcacagaccctcgggcctcatcatggccaggaagctgatccaccttgagatcaagccggccatccggaaccagatcatccgcgagctgcaggtcctgcacgaatgcaactcgccgtacatcgtgggcttctacggggccttctacagtgacggggagatcagcatttgcatggaacacatggacggcggctccctggaccaggtgctgaaagaggccaagaggattcccgaggagatcctggggaaagtcagcatcgcggttctccggggcttggcgtacctccgagagaagcaccagatcatgcaccgagatgtgaagccctccaacatcctcgtgaactctagaggggagatcaagctgtgtgacttcggggtgagcggccagctcatcgactccatggccaactccttcgtgggcacgcgctcctacatggctccggagcggttgcagggcacacattactcggtgcagtcggacatctggagcatgggcctgtccctggtggagctggccgtcggaaggtaccccatccccccgcccgacgccaaagagctggaggccatctttggccggcccgtggtcgacggggaagaaggagagcctcacagcatctcgcctcggccgaggccccccgggcgccccgtcagcggtcacgggatggatagccggcctgccatggccatctttgaactcctggactatattgtgaacgagccacctcctaagctgcccaacggtgtgttcacccccgacttccaggagtttgtcaataaatgcctcatcaagaacccagcggagcgggcggacctgaagatgctcacaaaccacaccttcatcaagcggtccgaggtggaagaagtggattttgccggctggttgtgtaaaaccctgcggctgaaccagcccggcacacccacgcgcaccgccgtgtgagcggccgctat

SEQ ID NO: 106 - protein, 404 aa, Homo sapiens
TGSTMLARRKPVLPALTINPTIAEGPSPTSEGASEANLVDLQKKLEELELDEQQKKRLEAFLTQKAKVGELKDDDFERISELGAGNGGVVTKVQHRPSGLIMARKLIHLEIKPAIRNQIIRELQVLHECNSPYIVGFYGAFYSDGEISICMEHMDGGSLDQVLKEAKRIPEEILGKVSIAVLRGLAYLREKHQIMHRDVKPSNILVNSRGEIKLCDFGVSGQLIDSMANSFVGTRSYMAPERLQGTHYSVQSDIWSMGLSLVELAVGRYPIPPPDAKELEAIFGRPVVDGEEGEPHSISPRPRPPGRPVSGHGMDSRPAMAIFELLDYIVNEPPPKLPNGVFTPDFQEFVNKCLIKNPAERADLKMLTNHTFIKRSEVEEVDFAGWLCKTLRLNQPGTPTRTAV

SEQ ID NO: 107 - DNA, 1164 bp, Homo sapiens
  CDS (14)..(1150)
caccggatccaccatgctggcccggaggaagccggtgctgccggcgctcaccatcaaccctaccatcgccgagggcccatcccctaccagcgagggcgcctccgaggcaaacctggtggacctgcagaagaagctggaggagctggaacttgacgagcagcagaagaagcggctggaagcctttctcacccagaaagccaaggtcggcgaactcaaagacgatgacttcgaaaggatctcagagctgggcgcgggcaacggcggggtggtcaccaaagtccagcacagaccctcgggcctcatcatggccaggaagctgatccaccttgagatcaagccggccatccggaaccagatcatccgcgagctgcaggtcctgcacgaatgcaactcgccgtacatcgtgggcttctacggggccttctacagtgacggggagatcagcatttgcatggaacacatggacggcggctccctggaccaggtgctgaaagaggccaagaggattcccgaggagatcctggggaaagtcagcatcgcggttctccggggcttggcgtacctccgagagaagcaccagatcatgcaccgagatgtgaagccctccaacatcctcgtgaactctagaggggagatcaagctgtgtgacttcgggccggagcggttgcagggcacacattactcggtgcagtcggacatctggagcatgggcctgtccctggtggagctggccgtcggaaggtaccccatccccccgcccgacgccaaagagctggaggccatctttggccggcccgtggtcgacggggaagaaggagagcctcacagcatctcgcctcggccgaggccccccgggcgccccgtcagcggtcacgggatggatagccggcctgccatggccatctttgaactcctggactatattgtgaacgagccacctcctaagctgcccaacggtgtgttcacccccgacttccaggagtttgtcaataaatgcctcatcaagaacccagcggagcgggcggacctgaagatgctcacaaaccacaccttcatcaagcggtccgaggtggaagaagtggattttgccggctggttgtgtaaaaccctgcggctgaaccagcccggcacacccacgcgcaccgccgtgtgagcggccgctat

SEQ ID NO: 108 - protein, 379 aa, Homo sapiens
MLARRKPVLPALTINPTIAEGPSPTSEGASEANLVDLQKKLEELELDEQQKKRLEAFLTQKAKVGELKDDDFERISELGAGNGGVVTKVQHRPSGLIMARKLIHLEIKPAIRNQIIRELQVLHECNSPYIVGFYGAFYSDGEISICMEHMDGGSLDQVLKEAKRIPEEILGKVSIAVLRGLAYLREKHQIMHRDVKPSNILVNSRGEIKLCDFGPERLQGTHYSVQSDIWSMGLSLVELAVGRYPIPPPDAKELEAIFGRPVVDGEEGEPHSISPRPRPPGRPVSGHGMDSRPAMAIFELLDYIVNEPPPKLPNGVFTPDFQEFVNKCLIKNPAERADLKMLTNHTFIKRSEVEEVDFAGWLCKTLRLNQPGTPTRTAV

SEQ ID NO: 109 - DNA, 985 bp, Homo sapiens
  CDS (54)..(983)
tccactacgggcccaggctagaggcgccgccgccgccggcccgcggagccccgatgctggcccggaggaagccggtgctgccggcgctcaccatcaaccctaccatcgccgagggcccatcccctaccagcgagggcgcctccgaggcaaacctggtggacctgcagaagaagctggaggagctggaacttgacgagcagcagaagaagcggctggaagcctttctcacccagaaagccaaggtcggcgaactcaaagacgatgacttcgaaaggatctcagagctgggcgcgggcaacggcggggtggtcaccaaagtccagcacagaccctcgggcctcatcatggccaggaagctgatccaccttgagatcaagccggccatccggaaccagatcatccgcgagctgcaggtcctgcacgaatgcaactcgccgtacatcgtgggcttctacggggccttctacagtgacggggagatcagcatttgcatggaacacatggacggcggctccctggaccaggtgctgaaagaggccaagaggattcccgaggagatcctggggaaagtcagcatcgcggttctccggggcttggcgtacctccgagagaagcaccagatcatgcaccgagatgtgaagccctccaacatcctcgtgaactctagaggggagatcaagctgtgtgacttcggggtgagcggccagctcatcgactccatggccaactccttcgtgggcacgcgctcctacatggctccacctcctaagctgcccaacggtgtgttcacccccgacttccaggagtttgtcaataaatgcctcatcaagaacccagcggagcgggcggacctgaagatgctcacaaaccacaccttcatcaagcggtccgaggtggaagaagtggattttgccggctggttgtgtaaaaccctgcggctgaaccagcccggcacacccacgcgcaccgccgtgtacagtggcaa

SEQ ID NO: 110 - protein, 310 aa, Homo sapiens
MLARRKPVLPALTINPTIAEGPSPTSEGASEANLVDLQKKLEELELDEQQKKRLEAFLTQKAKVGELKDDDFERISELGAGNGGVVTKVQHRPSGLIMARKLIHLEIKPAIRNQIIRELQVLHECNSPYIVGFYGAFYSDGEISICMEHMDGGSLDQVLKEAKRIPEEILGKVSIAVLRGLAYLREKHQIMHRDVKPSNILVNSRGEIKLCDFGVSGQLIDSMANSFVGTRSYMAPPPKLPNGVFTPDFQEFVNKCLIKNPAERADLKMLTNHTFIKRSEVEEVDFAGWLCKTLRLNQPGTPTRTAVYSG

SEQ ID NO: 111 - DNA, 1161 bp, Homo sapiens
  CDS (11)..(1147)
caccggatccatgctggcccggaggaagccggtgctgccggcgctcaccatcaaccctaccatcgccgagggcccatcccctaccagcgagggcgcctccgaggcaaacctggtggacctgcagaagaagctggaggagctggaacttgacgagcagcagaagaagcggctggaagcctttctcacccagaaagccaaggtcggcgaactcaaagacgatgacttcgaaaggatctcagagctgggcgcgggcaacggcggggtggtcaccaaagtccagcacagaccctcgggcctcatcatggccaggaagctgatccaccttgagatcaagccggccatccggaaccagatcatccgcgagctgcaggtcctgcacgaatgcaactcgccgtacatcgtgggcttctacggggccttctacagtgacggggagatcagcatttgcatggaacacatggacggcggctccctggaccaggtgctgaaagaggccaagaggattcccgaggagatcctggggaaagtcagcatcgcggttctccggggcttggcgtacctccgagagaagcaccagatcatgcaccgagatgtgaagccctccaacatcctcgtgaactctagaggggagatcaagctgtgtgacttcgggccggagcggttgcagggcacacattactcggtgcagtcggacatctggagcatgggcctgtccctggtggagctggccgtcggaaggtaccccatccccccgcccgacgccaaagagctggaggccatctttggccggcccgtggtcgacggggaagaaggagagcctcacagcatctcgcctcggccgaggccccccgggcgccccgtcagcggtcacgggatggatagccggcctgccatggccatctttgaactcctggactatattgtgaacgagccacctcctaagctgcccaacggtgtgttcacccccgacttccaggagtttgtcaataaatgcctcatcaagaacccagcggagcgggcggacctgaagatgctcacaaaccacaccttcatcaagcggtccgaggtggaagaagtggattttgccggctggttgtgtaaaaccctgcggctgaaccagcccggcacacccacgcgcaccgccgtgtgagcggccgcaag

SEQ ID NO: 112 - protein, 379 aa, Homo sapiens; identical to SEQ ID NO: 108

SEQ ID NO: 113 - DNA, 2246 bp, Homo sapiens
  CDS (1)..(2169)
cctgaggaagtgcaccatggagaggaggaggtggagacttttgcctttcaggcagaaattgcccaactcatgtccctcatcatcaataccttctattccaacaaggagattttccttcgggagttgatctctaatgcttctgatgccttggacaagattcgctatgagagcctgacagacccttcgaagttggacagtggtaaagagctgaaaattgacatcatcctcaaccctcaggaacgtaccctgactttggtagacacaggcattggcatgaccaaagctgatctcataaataatttgggaaccattgccaagtctggtactaaagcattcatggaggctcttcaggctggtgcagacatctccatgattgggcagtttggtgttggcttttattctgcctacttggtggcagagaaagtggttgtgatcacaaagcacaacgatgatgaacagtatgcttgggagtcttctgctggaggttccttcactgtgcgtgctgaccatggtgagcccattggcaggggtaccaaagtgatcctccatcttaaagaagatcagacagagtacctagaagagaggcgggtcaaagaagtagtgaagaagcattctcagttcataggctatcccatcaccctttatttggagaaggaacgagagaaggaaattagtgatgatgaggcagaggaagagaaaggtgagaaagaagaggaagataaagatgatgaagaaaagcccaagatcgaagatgtgggttcagatgaggaggatgacagcggtaaggataaggagaagaaaactaagaagatcaaagagaaatacattgatcaggaagaactaaacaagaccaagcctatttggaccagaaaccctgatgacatcacccaagaggagtatggagaattctacaagagcctcactaatgactgggaagaccacttggcagtcaagcacttttctgtagaaggtcagttggaattcagggcattgctatttattcctcgtcgggctccctttgacctttttgagaacaagaagaaaaagaacaacatcaaactctatgtccgccgtgtgttcatcatggacagctgtgatgagttgataccagagtatctcaattttatccgtggtgtggttgactctgaggatctgcccctgaacatctcccgagaaatgctccagcagagcaaaatcttgaaagtcattcgcaaaaacattgttaagaagtgccttgagctcttctctgagctggcagaagacaaggagaattacaagaaattctatgaggcattctctaaaaatctcaagcttggaatccacgaagactccactaaccgccgccgcctgtctgagctgctgcgctatcatacctcccagtctggagatgagatgacatctctgtcagagtatgtttctcgcatgaaggagacacagaagtccatctattacatcactggtgagagcaaagagcaggtggccaactcagcttttgtggagcgagtgcggaaacggggcttcgaggtggtatatatgaccgagcccattgacgagtactgtgtgcagcagctcaaggaatttgatgggaagagcctggtctcagttaccaaggagggtctggagctgcctgaggatgaggaggagaagaagaagatggaagagagcaaggcaaagtttgagaacctctgcaagctcatgaaagaaatcttagataagaaggttgagaaggtgacaatctccaatagacttgtgtcttcaccttgctgcattgtgaccagcacctacggctggacagccaatatggagcggatcatgaaagcccaggcacttcgggacaactccaccatgggctatatgatggccaaaaagcacctggagatcaaccctgaccaccccattgtggagacgctgcggcagaaggctgaggccgacaagaatgataaggcagttaaggacctggtggtgctgctgtttgaaaccgccctgctatcttctggcttttcccttgaggatccccagacccactccaaccgcatctatcgcatgatcaagctaggtctaggtattgatgaagatgaagtggcagcagaggaacccaatgctgcagttcctgatgagatcccccctctcgagggcgatgaggatgcgtctcgcatggaagaagtcgattaggttaggagttcatagttggaaaacttgtgcccttgtatagtgtccccatgggctcccacagtacttgttagcta

SEQ ID NO: 114 - protein, 723 aa, Homo sapiens
PEEVHHGEEEVETFAFQAEIAQLMSLIINTFYSNKEIFLRELISNASDALDKIRYESLTDPSKLDSGKELKIDIILNPQERTLTLVDTGIGMTKADLINNLGTIAKSGTKAFMEALQAGADISMIGQFGVGFYSAYLVAEKVVVITKHNDDEQYAWESSAGGSFTVRADHGEPIGRGTKVILHLKEDQTEYLEERRVKEVVKKHSQFIGYPITLYLEKEREKEISDDEAEEEKGEKEEEDKDDEEKPKIEDVGSDEEDDSGKDKEKKTKKIKEKYIDQEELNKTKPIWTRNPDDITQEEYGEFYKSLTNDWEDHLAVKHFSVEGQLEFRALLFIPRRAPFDLFENKKKKNNIKLYVRRVFIMDSCDELIPEYLNFIRGVVDSEDLPLNISREMLQQSKILKVIRKNIVKKCLELFSELAEDKENYKKFYEAFSKNLKLGIHEDSTNRRRLSELLRYHTSQSGDEMTSLSEYVSRMKETQKSIYYITGESKEQVANSAFVERVRKRGFEVVYMTEPIDEYCVQQLKEFDGKSLVSVTKEGLELPEDEEEKKKMEESKAKFENLCKLMKEILDKKVEKVTISNRLVSSPCCIVTSTYGWTANMERIMKAQALRDNSTMGYMMAKKHLEINPDHPIVETLRQKAEADKNDKAVKDLVVLLFETALLSSGFSLEDPQTHSNRIYRMIKLGLGIDEDEVAAEEPNAAVPDEIPPLEGDEDASRMEEVD

SEQ ID NO: 115 - DNA, 1365 bp, Homo sapiens
  CDS (94)..(1038)
ggcacgaggctccggcgcagtgttgggactgtctgggtatcggaaagcaagcctacgttgctcactattacgtataatccttttcttttcaagatgcctgaggaagtgcaccatggagaggaggaggtggagacttttgcctttcaggcagaaattgcccaactcatgtccctcatcatcaataccttctattccaacaaggagattttccttcgggagttgatctctaatgcttctgatgccttggacaagattcgctatgagagcctgacagacccttcgaagttggacagtggtaaagagctgaaaattgacatcatccccaaccctcaggaacgtaccctgactttggtagacacaggcattggcatgaccaaagctgatctcataaataatttgggaaccattgccaagtctggtactaaagcattcatggaggctcttcagatgaggaggatgacagcggtaaggataagaagaagaaaactaagaagatcaaagagaaatacattgatcaggaagatggaagagagcagggcaaagtttgagaacctctgcaagctcatgaaagaaatcttagataagaaggttgagaaggtgacaatctccaatagacttgtgtcttcaccttgctgcattgtgaccagcacctacggctggacagccaatatggagcggatcatgaaagcccaggcacttcgggacaactccaccatgggctatatgatggccaaaaagcacctggagatcaaccctgaccaccccattgtggagacgctgcggcagaaggctgaggccgacaagaatgataaggcagttaaggacctggtggtgctgctgtttgaaaccgccctgctatcttctggcttttcccttgaggatccccagacccactccaaccgcatctatcgcatgatcaagctaggtctaggtattgatgaagatgaagtggcagcagaggaacccaatgctgcagttcctgatgagatcccccctctcgagggcgatgaggatgcgtctcgcatggaagaagtcgattaggttaggagttcatagttggaaaacttgtgcccttgtatagtgtccccatgggctcccactgcagcctcgagtgcccctgtcccacctggctccccctgctggtgtctagtgtttttttccctctcctgtccttgtgttgaaggcagtaaactaagggtgtcaagccccattccctctctactcttgacagcaggattggatgttgtgtattgtggtttattttattttcttcattttgttctgaaattaaagtatgcaaaataaagaatatgccgtttttataaaaaaaaaaaaaaaaaaaaaaaaaaaaaaaaaaaaaaaaaa

SEQ ID NO: 116 - protein, 315 aa, Homo sapiens
MPEEVHHGEEEVETFAFQAEIAQLMSLIINTFYSNKEIFLRELISNASDALDKIRYESLTDPSKLDSGKELKIDIIPNPQERTLTLVDTGIGMTKADLINNLGTIAKSGTKAFMEALQMRRMTAVRIRRRKLRRSKRNTLIRKMEESRAKFENLCKLMKEILDKKVEKVTISNRLVSSPCCIVTSTYGWTANMERIMKAQALRDNSTMGYMMAKKHLEINPDHPIVETLRQKAEADKNDKAVKDLVVLLFETALLSSGFSLEDPQTHSNRIYRMIKLGLGIDEDEVAAEEPNAAVPDEIPPLEGDEDASRMEEVD

SEQ ID NO: 117 - DNA, 2564 bp, Homo sapiens
  CDS (94)..(2112)
ggcacgaggctccggcgcagtgttgggactgtctgggtatcggaaagcaagcctacgttgctcactattacgtataatccttttcttttcaagatgcctgaggaagtgcaccatggagaggaggaggtggagacttttgcctttcaggcagaaattgcccaactcatgtccctcatcatcaataccttctattccaacaaggagattttccttcgggagttgatctctaatgcttctgatgccttggacaagattcgctatgagagcctgacagacccttcgaagttggacagtggtaaagagctgaaaattgacatcatccccaaccctcaggaacgtaccctgactttggtagacacaggcattggcatgaccaaagctgatctcataaataatttgggaaccattgccaagtctggtactaaagcattcatggaggctcttcaggctggtgcagacatctccatgattgggcagtttggtgttggcttttattctgcctacttggtggcagagaaagtggttgtgatcacaaagcacaacgatgatgaacagtatgcttgggagtcttctgctggaggttccttcactgtgcgtgctgaccatggtgagcccattggcaggggtaccaaagtgatcctccatcttaaagaagatcagacagagtacctagaagagaggcgggtcaaagaagtagtgaagaagcattctcagttcataggctatcccatcaccctttatttggagaaggaacgagagaaggaaattagtgatgatgaggcagaggaagagaaaggtgagaaagaagaggaagataaagatgatgaagaaaaacccaagatcgaagatgtgggttcagatgaggaggatgacagcggtaaggataagaagaagaaaactaagaagatcaaagagaaatacattgatcaggaagaactaaacaagaccaagcctatttggaccagaaaccctgatgacatcacccaagaggagtatggagaattctacaagagcctcactaatgactgggaagaccacttggcagtcaagcacttttctgtagaaggtcagttggaattcagggcattgctatttattcctcgtcgggctccctttgacctttttgagaacaagaagaaaaagaacaacatcaaactctatgtccgccgtgtgttcatcatggacagctgtgatgagttgataccagagtatctcaattttatccgtggtgtggttgactctgaggatctgcccctgaacatctcccgagaaatgctccagcagagcaaaatcttgaaagtcattcgcaaaaacattgttaagaagtgccttgagctcttctctgagctggcagaagacaaggagaattacaagaaattctatgaggcattctctaaaaatctcaagcttggaatccacgaagactccactaaccgccgccgcctgtctgagctgctgcgctatcatacctcccagtctggagatgagatgacatctctgtcagagtatgtttctcgcatgaaggagacacagaagtccatctattacatcactggtgagagcaaagagcaggtggccaactcagcttttgtggagcgagtgcggaaacggggcttcgaggtggtatatatgaccgagcccattgacgagtactgtgtgcagcagctcaaggaatttgatgggaagagcctggtctcagttaccaaggagggtctggagctgcctgaggatgaggaggagaagaagaagatggaagagagcaaggcaaagtttgagaacctctgcaagctcatgaaagaaatcttagataagaaggttgagaaggtgacaatctccaatagacttgtgtcttcaccttgctgcattgtgaccagcacctacggctggacagccaatatggagcggatcatgaaagcccaggcacttcgggacaactccaccatgggctatatgatggccaccccattgtggagacgctgcggcagaaggctgaggccgacaagaatgataaggcagttaaggacctggtggtgctgctgtttgaaaccgccctgctatcttctggcttttcccttgaggatccccagacccactccaaccgcatctatcgcatgatcaagctaggtctaggtattgatgaagatgaagtggcagcagaggaacccaatgctgcagttcctgatgagatcccccctctcgagggcgatgaggatgcgtctcgcatggaagaagtcgattaggttaggagttcatagttggaaaacttgtgcccttgtatagtgtccccatgggctcccactgcagcctcgagtgcccctgtcccacctggctccccctgctggtgtctagtgtttttttccctctcctgtccttgtgttgaaggcagtaaactaagggtgtcaagccccattccctctctactcttgacagcaggattggatgttgtgtattgtggtttattttattttcttcattttgttctgaaattaaagtatgcaaaataaagaatatgccgtttttataaaaaaaaaaaaaaaaaaaaaaaaaaaaaaaaaaaaaaaaaa

SEQ ID NO: 118 - protein, 673 aa, Homo sapiens
MPEEVHHGEEEVETFAFQAEIAQLMSLIINTFYSNKEIFLRELISNASDALDKIRYESLTDPSKLDSGKELKIDIIPNPQERTLTLVDTGIGMTKADLINNLGTIAKSGTKAFMEALQAGADISMIGQFGVGFYSAYLVAEKVVVITKHNDDEQYAWESSAGGSFTVRADHGEPIGRGTKVILHLKEDQTEYLEERRVKEVVKKHSQFIGYPITLYLEKEREKEISDDEAEEEKGEKEEEDKDDEEKPKIEDVGSDEEDDSGKDKKKKTKKIKEKYIDQEELNKTKPIWTRNPDDITQEEYGEFYKSLTNDWEDHLAVKHFSVEGQLEFRALLFIPRRAPFDLFENKKKKNNIKLYVRRVFIMDSCDELIPEYLNFIRGVVDSEDLPLNISREMLQQSKILKVIRKNIVKKCLELFSELAEDKENYKKFYEAFSKNLKLGIHEDSTNRRRLSELLRYHTSQSGDEMTSLSEYVSRMKETQKSIYYITGESKEQVANSAFVERVRKRGFEVVYMTEPIDEYCVQQLKEFDGKSLVSVTKEGLELPEDEEEKKKMEESKAKFENLCKLMKEILDKKVEKVTISNRLVSSPCCIVTSTYGWTANMERIMKAQALRDNSTMGYMMATPLWRRCGRRLRPTRMIRQLRTWWCCCLKPPCYLLAFPLRIPRPTPTASIA

SEQ ID NO: 119 - DNA, 2540 bp, Homo sapiens
  CDS (85)..(2256)
ctccggcgcagtgttgggactgtctgggtatcggaaagcaagcctacgttgctcactattacgtataatccttttcttttcaagatgcctgaggaagtgcaccatggagaggaggaggtggagacttttgcctttcaggcagaaattgcccaactcatgtccctcatcatcaataccttctattccaacaaggagattttccttcgggagttgatctctaatgcttctgatgccttggacaagattcgctatgagagcctgacagacccttcgaagttggacagtggtaaagagctgaaaattgacatcatccccaaccctcaggaacgtaccctgactttggtagacacaggcattggcatgaccaaagctgatctcataaataatttgggaaccattgccaagtctggtactaaagcattcatggaggctcttcaggctggtgcagacatctccatgattgggcagtttggtgttggcttttattctgcctacttggtggcagagaaagtggttgtgatcagaaagcacaacgatgatgaacagtatgcttgggagtcttctgctggaggttccttcactgtgcgtgctgaccatggtgagcccattggcatgggtaccaaagtgatcctccatcttaaagaagatcagacagagtacctagaagagaggcgggtcaaagaagtagtgaagaagcattctcagttcataggctatcccatcaccctttatttggagaaggaacgagagaaggaaattagtgatgatgaggcagaggaagagaaaggtgagaaagaagaggaagataaagatgatgaagaaaagcccaagatcgaagatgtgggttcagatgaggaggatgacagcggtaaggataagaagaagaaaactaagaagatcaaagagaaatacattgatcaggaagaactaaacaagaccaagcctatttggaccagaaaccctgatgacatcacccaagaggagtatggagaattctacaagagcctcactaatgactgggaagaccacttggcagtcaagcacttttctgtagaaggtcagttggaattcagggcattgctatttattcctcgtcgggctccctttgacctttttgagaacaagaagaaaaagaacaacatcaaactctatgtccgccgtgtgttcatcatggacagctgtgatgagttgataccagagtatctcaattttatccgtggtgtggttgactctgaggatctgcccctgaacatctcccgagaaatgctccagcagagcaaaatcttgaaagtcattcgcaaaaacattgttaagaagtgccttgagctcttctctgagctggcagaagacaaggagaattacaagaaattctatgaggcattctctaaaaatctcaagcttggaatccacgaagactccactaaccgccgccgcctgtctgagctgctgcgctatcatacctcccagtctggagatgagatgacatctctgtcagagtatgtttctcgcatgaaggagacacagaagtccatctattacatcactggtgagagcaaagagcaggtggccaactcagcttttgtggagcgagtgcggaaacggggcttcgaggtggtatatatgaccgagcccattgacgagtactgtgtgcagcagctcaaggaatttgatgggaagagcctggtctcagttaccaaggagggtctggagctgcctgaggatgaggaggagaagaagaagatggaagagagcaaggcaaagtttgagaacctctgcaagctcatgaaagaaatcttagataagaaggttgagaaggtgacaatctccaatagacttgtgtcttcaccttgctgcattgtgaccagcacctacggctggacagccaatatggagcggatcatgaaagcccaggcacttcgggacaactccaccatgggctatatgatggccaaaaagcacctggagatcaaccctgaccaccccattgtggagacgctgcggcagaaggctgaggccgacaagaatgataaggcagttaaggacctggtggtgctgctgtttgaaaccgccctgctatcttctggcttttcccttgaggatccccagacccactccaaccgcatctatcgcatgatcaagctaggtctaggtattgatgaagatgaagtggcagcagaggaacccaatgctgcagttcctgatgagatcccccctctcgagggcgatgaggatgcgtctcgcatggaagaagtcgattaggttaggagttcatagttggaaaacttgtgcccttgtatagtgtccccatgggctcccactgcagcctcgagtgcccctgtcccacctggctccccctgctggtgtctagtgtttttttccctctcctgtccttgtgttgaaggcagtaaactaagggtgtcaagccccattccctctctactcttgacagcaggattggatgttgtgtattgtggtttattttattttcttcattttgttctgaaattaaagtatgcaaaataaagaatatgccgttttta

SEQ ID NO: 120 - protein, 724 aa, Homo sapiens
MPEEVHHGEEEVETFAFQAEIAQLMSLIINTFYSNKEIFLRELISNASDALDKIRYESLTDPSKLDSGKELKIDIIPNPQERTLTLVDTGIGMTKADLINNLGTIAKSGTKAFMEALQAGADISMIGQFGVGFYSAYLVAEKVVVIRKHNDDEQYAWESSAGGSFTVRADHGEPIGMGTKVILHLKEDQTEYLEERRVKEVVKKHSQFIGYPITLYLEKEREKEISDDEAEEEKGEKEEEDKDDEEKPKIEDVGSDEEDDSGKDKKKKTKKIKEKYIDQEELNKTKPIWTRNPDDITQEEYGEFYKSLTNDWEDHLAVKHFSVEGQLEFRALLFIPRRAPFDLFENKKKKNNIKLYVRRVFIMDSCDELIPEYLNFIRGVVDSEDLPLNISREMLQQSKILKVIRKNIVKKCLELFSELAEDKENYKKFYEAFSKNLKLGIHEDSTNRRRLSELLRYHTSQSGDEMTSLSEYVSRMKETQKSIYYITGESKEQVANSAFVERVRKRGFEVVYMTEPIDEYCVQQLKEFDGKSLVSVTKEGLELPEDEEEKKKMEESKAKFENLCKLMKEILDKKVEKVTISNRLVSSPCCIVTSTYGWTANMERIMKAQALRDNSTMGYMMAKKHLEINPDHPIVETLRQKAEADKNDKAVKDLVVLLFETALLSSGFSLEDPQTHSNRIYRMIKLGLGIDEDEVAAEEPNAAVPDEIPPLEGDEDASRMEEVD

SEQ ID NO: 121 - DNA, 2442 bp, Homo sapiens
  CDS (77)..(2395)
tgcagttgcttcctttccttgaaggtagctgtatcttattttctttaaaaagctttttcttccaaagccacttgccatgccgaccgtcattagcgcatctgtggctccaaggacagcggctgagccccggtccccagggccagttcctcacccggcccagagcaaggccactgaggctgggggtggaaacccaagtggcatctattcagccatcatcagccgcaattttcctattatcggagtgaaagagaagacattcgagcaacttcacaagaaatgtctagaaaagaaagttctttatgtggaccctgagttcccaccggatgagacctctctcttttatagccagaagttccccatccagttcgtctggaagagacctccggaaatttgcgagaatccccgatttatcattgatggagccaacagaactgacatctgtcaaggagagctaggggactgctggtttctcgcagccattgcctgcctgaccctgaaccagcaccttcttttccgagtcataccccatgatcaaagtttcatcgaaaactacgcagggatcttccacttccagttctggcgctatggagagtgggtggacgtggttatagatgactgcctgccaacgtacaacaatcaactggttttcaccaagtccaaccaccgcaatgagttctggagtgctctgctggagaaggcttatgctaagctccatggttcctacgaagctctgaaaggtgggaacaccacagaggccatggaggacttcacaggaggggtggcagagttttttgagatcagggatgctcctagtgacatgtacaagatcatgaagaaagccatcgagagaggctccctcatgggctgctccattgatacaatcattccggttcagtatgagacaagaatggcctgcgggctggtcagaggtcacgcctactctgtcacggggctggatgaggtcccgttcaaaggtgagaaagtgaagctggtgcggctgcggaatccgtggggccaggtggagtggaacggttcttggagtgatagatggaaggactggagctttgtggacaaagatgagaaggcccgtctgcagcaccaggtcactgaggatggagagttctggatgtcctatgaggatttcatctaccatttcacaaagttggagatctgcaacctcacggccgatgctctgcagtctgacaagcttcagacctggacagtgtctgtgaacgagggccgctgggtacggggttgctctgccggaggctgccgcaacttcccagatactttctggaccaaccctcagtaccgtctgaagctcctggaggaggacgatgaccctgatgactcggaggtgatttgcagcttcctggtggccctgatgcagaagaaccggcggaaggaccggaagctaggggccagtctcttcaccattggcttcgccatctacgaggttcccaaagagatgcacgggaacaagcagcacctgcagaaggacttcttcctgtacaacgcctccaaggccaggagcaaaacctacatcaacatgcgggaggtgtcccagcgcttccgcctgcctcccagcgagtacgtcatcgtgccctccacctacgagccccaccaggagggggaattcatcctccgggtcttctctgaaaagaggaacctctctgaggaagttgaaaataccatctccgtggatcggccagtgaaaaagaaaaaaaccaagcccatcatcttcgtttcggacagagcaaacagcaacaaggagctgggtgtggaccaggagtcagaggagggcaaaggcaaaacaagccctgataagcaaaagcagtccccacagccacagcctggcagctctgatcaggaaagtgaggaacagcaacaattccggaacattttcaagcagatagcaggagatgacatggagatctgtgcagatgagctcaagaaggtccttaacacagtcgtgaacaaacacaaggacctgaagacacacgggttcacactggagtcctgccgtagcatgattgcgctcatggatacagatggctctggaaagctcaacctgcaggagttccaccacctctggaacaagattaaggcctggcagaaaattttcaaacactatgacacagaccagtccggcaccatcaacagctacgagatgcgaaatgcagtcaacgacgcaggattccacctcaacaaccagctctatgacatcattaccatgcggtacgcagacaaacacatgaacatcgactttgacagtttcatctgctgcttcgttaggctggagggcatgttcagagcttttcatgcatttgacaaggatggagatggtatcatcaagctcaacgttctggagtggctgcagctcaccatgtatgcctgaaccaggctggcctcatccaaagccatgcaggatcactcaggatt

SEQ ID NO: 122 - protein, 773 aa, Homo sapiens
MPTVISASVAPRTAAEPRSPGPVPHPAQSKATEAGGGNPSGIYSAIISRNFPIIGVKEKTFEQLHKKCLEKKVLYVDPEFPPDETSLFYSQKFPIQFVWKRPPEICENPRFIIDGANRTDICQGELGDCWFLAAIACLTLNQHLLFRVIPHDQSFIENYAGIFHFQFWRYGEWVDVVIDDCLPTYNNQLVFTKSNHRNEFWSALLEKAYAKLHGSYEALKGGNTTEAMEDFTGGVAEFFEIRDAPSDMYKIMKKAIERGSLMGCSIDTIIPVQYETRMACGLVRGHAYSVTGLDEVPFKGEKVKLVRLRNPWGQVEWNGSWSDRWKDWSFVDKDEKARLQHQVTEDGEFWMSYEDFIYHFTKLEICNLTADALQSDKLQTWTVSVNEGRWVRGCSAGGCRNFPDTFWTNPQYRLKLLEEDDDPDDSEVICSFLVALMQKNRRKDRKLGASLFTIGFAIYEVPKEMHGNKQHLQKDFFLYNASKARSKTYINMREVSQRFRLPPSEYVIVPSTYEPHQEGEFILRVFSEKRNLSEEVENTISVDRPVKKKKTKPIIFVSDRANSNKELGVDQESEEGKGKTSPDKQKQSPQPQPGSSDQESEEQQQFRNIFKQIAGDDMEICADELKKVLNTVVNKHKDLKTHGFTLESCRSMIALMDTDGSGKLNLQEFHHLWNKIKAWQKIFKHYDTDQSGTINSYEMRNAVNDAGFHLNNQLYDIITMRYADKHMNIDFDSFICCFVRLEGMFRAFHAFDKDGDGIIKLNVLEWLQLTMYA

SEQ ID NO: 123 - DNA, 2469 bp, Homo sapiens
  CDS (1)..(2463)
atgccgaccgtcattagcgcatctgtggctccaaggacagcggctgagccccggtccccagggccagttcctcacccggcccagagcaaggccactgaggctgggggtggaaacccaagtggcatctattcagccatcatcagccgcaattttcctattatcggagtgaaagagaagacattcgagcaacttcacaagaaatgtctagaaaagaaagttctttatgtggaccctgagttcccaccggatgagacctctctcttttatagccagaagttccccatccagttcgtctggaagagacctccggaaatttgcgagaatccccgatttatcattgatggagccaacagaactgacatctgtcaaggagagctaggggactgctggtttctcgcagccattgcctgcctgaccctgaaccagcaccttcttttccgagtcataccccatgatcaaagtttcatcgaaaactacgcagggatcttccacttccagttctggcgctatggagagtgggtggacgtggttatagatgactgcctgccaacgtacaacaatcaactggttttcaccaagtccaaccaccgcaatgagttctggagtgctctgctggagaaggcttatgctaagctccatggttcctacgaagctctgaaaggtgggaacaccacagaggccatggaggacttcacaggaggggtggcagagttttttgagatcagggatgctcctagtgacatgtacaagatcatgaagaaagccatcgagagaggctccctcatgggctgctccattgatgatggcacgaacatgacctatggaacctctccttctggtctgaacatgggggagttgattgcacggatggtaaggaatatggataactcactgctccaggactcagacctcgaccccagaggctcagatgaaagaccgacccggacaatcattccggttcagtatgagacaagaatggcctgcgggctggtcagaggtcacgcctactctgtcacggggctggatgaggtcccgttcaaaggtgagaaagtgaagctggtgcggctgcggaatccgtggggccaggtggagtggaacggttcttggagtgatagatggaaggactggagctttgtggacaaagatgagaaggcccgtctgcagcaccaggtcactgaggatggagagttctggatgtcctatgaggatttcatctaccatttcacaaagttggagatctgcaacctcacggccgatgctctgcagtctgacaagcttcagacctggacagtgtctgtgaacgagggccgctgggtacggggttgctctgccggaggctgccgcaacttcccagatactttctggaccaaccctcagtaccgtctgaagctcctggaggaggacgatgaccctgatgactcggaggtgatttgcagcttcctggtggccctgatgcagaagaaccggcggaaggaccggaagctaggggccagtctcttcaccattggcttcgccatctacgaggttcccaaagagatgcacgggaacaagcagcacctgcagaaggacttcttcctgtacaacgcctccaaggccaggagcaaaacctacatcaacatgcgggaggtgtcccagcgcttccgcctgcctcccagcgagtacgtcatcgtgccctccacctacgagccccaccaggagggggaattcatcctccgggtcttctctgaaaagaggaacctctctgaggaagttgaaaataccatctccgtggatcggccagtgaaaaagaaaaaaaccaagcccatcatcttcgtttcggacagagcaaacagcaacaaggagctgggtgtggaccaggagtcagaggagggcaaaggcaaaacaagccctgataagcaaaagcagtccccacagccacagcctggcagctctgatcaggaaagtgaggaacagcaacaattccggaacattttcaagcagatagcaggagatgacatggagatctgtgcagatgagctcaagaaggtccttaacacagtcgtgaacaaacacaaggacctgaagacacacgggttcacactggagtcctgccgtagcatgattgcgctcatggatacagatggctctggaaagctcaacctgcaggagttccaccacctctggaacaagattaaggcctggcagaaaattttcaaacactatgacacagaccagtccggcaccatcaacagctacgagatgcgaaatgcagtcaacgacgcaggattccacctcaacaaccagctctatgacatcattaccatgcggtacgcagacaaacacatgaacatcgactttgacagtttcatctgctgcttcgttaggctggagggcatgttcagagcttttcatgcatttgacaaggatggagatggtatcatcaagctcaacgttctggagtggctgcagctcaccatgtatgcctgaaaa

SEQ ID NO: 124 - protein, 821 aa, Homo sapiens
MPTVISASVAPRTAAEPRSPGPVPHPAQSKATEAGGGNPSGIYSAIISRNFPIIGVKEKTFEQLHKKCLEKKVLYVDPEFPPDETSLFYSQKFPIQFVWKRPPEICENPRFIIDGANRTDICQGELGDCWFLAAIACLTLNQHLLFRVIPHDQSFIENYAGIFHFQFWRYGEWVDVVIDDCLPTYNNQLVFTKSNHRNEFWSALLEKAYAKLHGSYEALKGGNTTEAMEDFTGGVAEFFEIRDAPSDMYKIMKKAIERGSLMGCSIDDGTNMTYGTSPSGLNMGELIARMVRNMDNSLLQDSDLDPRGSDERPTRTIIPVQYETRMACGLVRGHAYSVTGLDEVPFKGEKVKLVRLRNPWGQVEWNGSWSDRWKDWSFVDKDEKARLQHQVTEDGEFWMSYEDFIYHFTKLEICNLTADALQSDKLQTWTVSVNEGRWVRGCSAGGCRNFPDTFWTNPQYRLKLLEEDDDPDDSEVICSFLVALMQKNRRKDRKLGASLFTIGFAIYEVPKEMHGNKQHLQKDFFLYNASKARSKTYINMREVSQRFRLPPSEYVIVPSTYEPHQEGEFILRVFSEKRNLSEEVENTISVDRPVKKKKTKPIIFVSDRANSNKELGVDQESEEGKGKTSPDKQKQSPQPQPGSSDQESEEQQQFRNIFKQIAGDDMEICADELKKVLNTVVNKHKDLKTHGFTLESCRSMIALMDTDGSGKLNLQEFHHLWNKIKAWQKIFKHYDTDQSGTINSYEMRNAVNDAGFHLNNQLYDIITMRYADKHMNIDFDSFICCFVRLEGMFRAFHAFDKDGDGIIKLNVLEWLQLTMYA

SEQ ID NO: 125 - DNA, 3071 bp, Homo sapiens
  CDS (15)..(3068)
ttccagccggcaggatggaggacgaggaaggccctgagtatggcaaacctgactttgtgcttttggaccaagtgaccatggaggacttcatgaggaacctgcagctcaggttcgagaagggccgcatctacacctacatcggtgaggtgctggtgtccgtgaacccctaccaggagctgcccctgtatgggcctgaggccatcgccaggtaccagggccgtgagctctatgagcggccaccccatctctatgctgtggccaacgccgcctacaaggcaatgaagtaccggtccagggacacctgcatcgtcatctcaggggagagtggggcagggaagacagaagccagtaagcacatcatgcagtacatcgctgctgtcaccaatccaagccagagggctgaggtggagagggtcaaggacgtgctgctcaagtccacctgtgtgctggaggcctttggcaatgcccgcaccaaccgcaatcacaactccagccgctttggcaagtacatggacatcaactttgacttcaagggggacccgatcggaggacgcatccacagctacctactggagaagtctcgggtcctcaagcagcacgtgggtgaaagaaacttccacgccttctaccaattgctgagaggcagtgaggacaagcagctgcatgaactgcacttggagagaaaccctgctgtatacaatttcacacaccagggagcaggactcaacatgactgtgcacagtgccttggacagtgatgagcagagccaccaggcagtgaccgaggccatgagggtcatcggcttcagtcctgaagaggtggagtctgtgcatcgcatcctggctgccatattgcacctgggaaacatcgagtttgtggagacggaggagggtgggctgcagaaggagggcctggcagtggccgaggaggcactggtggaccatgtggctgagctgacggccacaccccgggacctcgtgctccgctccctgctggctcgcacagttgcctcgggaggcagggaactcatagagaagggccacactgcagctgaggccagctatgcccgggatgcctgtgccaaggcagtgtaccagcggctgtttgagtgggtggtgaacaggatcaacagtgtcatggaaccccggggccgggatcctcggcgtgatggcaaggacacagtcattggcgtgctggacatctatggcttcgaggtgtttcccgtcaacagtttcgagcagttctgcatcaactactgcaatgagaagctgcagcagctattcatccagctcatcctgaagcaggaacaggaagagtacgagcgcgagggcatcacctggcagagcgttgagtatttcaacaacgccaccattgtggatctggtggagcggccccaccgtggcatcctggccgtgctggacgaggcctgcagctctgctggcaccatcactgaccgaatcttcctgcagaccctggacacgcaccaccgccatcacctacactacaccagccgccagctctgccccacagacaagaccatggagtttggccgagacttccggatcaagcactatgcaggggacgtcacgtactccgtggaaggcttcatcgacaagaacagagatttcctcttccaggacttcaagcggctgctgtacaacagcacggaccccactctacgggccatgtggccggacgggcagcaggacatcacagaggtgaccaagcgccccctgacggctggcacactcttcaagaactccatggtggccctggtggagaaccttgcctccaaggagcccttctacgtccgctgcatcaagcccaatgaggacaaggtagctgggaagctggatgagaaccactgtcgccaccaggtcgcatacctggggctgctggagaatgtgagggtccgcagggctggcttcgcttcccgccagccctactctcgattcctgctcaggtacaagatgacctgtgaatacacatggcccaaccacctgctgggctccgacaaggcagccgtgagcgctctcctggagcagcacgggctgcagggggacgtggcctttggccacagcaagctgttcatccgctcaccccggacactggtcacactggagcagagccgagcccgcctcatccccatcattgtgctgctattgcagaaggcatggcggggcaccttggcgaggtggcgctgccggaggctgagggctatctacaccatcatgcgctggttccggagacacaaggtgcgggctcacctggctgagctgcagcggcgattccaggctgcaaggcagccgccactctacgggcgtgaccttgtgtggccgctgccccctgctgtgctgcagcccttccaggacacctgccacgcactcttctgcaggtggcgggcccggcagctggtgaagaacatccccccttcagacatgccccagatcaaggccaaggtggccgccatgggggccctgcaagggcttcgtcaggactggggctgccgacgggcctgggcccgagactacctgtcctctgccactgacaatcccacagcatcaagcctgtttgctcagcgactaaagacacttcgggacaaagatggcttcggggctgtgctcttttcaagccatgtccgcaaggtgaaccgcttccacaagatccggaaccgggccctcctgctcacagaccagcacctctacaagctggaccctgaccggcagtaccgggtgatgcgggccgtgccccttgaggcggtgacggggctgagcgtgaccagcggaggagaccagctggtggtgctgcacgcccgcggccaggacgacctcgtggtgtgcctgcaccgctcccggccgccattggacaaccgcgttggggagctggtgggcgtgctggccgcacactgccagggggagggccgcaccctggaggttcgcgtctccgactgcatcccactaagccatcgcggggtccggcgcctcatctccgtggagcccaggccggagcagccagagcccgatttccgctgcgctcgcggctccttcaccctgctctggcccagccgctga

SEQ ID NO: 126 - protein, 1018 aa, Homo sapiens
MEDEEGPEYGKPDFVLLDQVTMEDFMRNLQLRFEKGRIYTYIGEVLVSVNPYQELPLYGPEAIARYQGRELYERPPHLYAVANAAYKAMKYRSRDTCIVISGESGAGKTEASKHIMQYIAAVTNPSQRAEVERVKDVLLKSTCVLEAFGNARTNRNHNSSRFGKYMDINFDFKGDPIGGRIHSYLLEKSRVLKQHVGERNFHAFYQLLRGSEDKQLHELHLERNPAVYNFTHQGAGLNMTVHSALDSDEQSHQAVTEAMRVIGFSPEEVESVHRILAAILHLGNIEFVETEEGGLQKEGLAVAEEALVDHVAELTATPRDLVLRSLLARTVASGGRELIEKGHTAAEASYARDACAKAVYQRLFEWVVNRINSVMEPRGRDPRRDGKDTVIGVLDIYGFEVFPVNSFEQFCINYCNEKLQQLFIQLILKQEQEEYEREGITWQSVEYFNNATIVDLVERPHRGILAVLDEACSSAGTITDRIFLQTLDTHHRHHLHYTSRQLCPTDKTMEFGRDFRIKHYAGDVTYSVEGFIDKNRDFLFQDFKRLLYNSTDPTLRAMWPDGQQDITEVTKRPLTAGTLFKNSMVALVENLASKEPFYVRCIKPNEDKVAGKLDENHCRHQVAYLGLLENVRVRRAGFASRQPYSRFLLRYKMTCEYTWPNHLLGSDKAAVSALLEQHGLQGDVAFGHSKLFIRSPRTLVTLEQSRARLIPIIVLLLQKAWRGTLARWRCRRLRAIYTIMRWFRRHKVRAHLAELQRRFQAARQPPLYGRDLVWPLPPAVLQPFQDTCHALFCRWRARQLVKNIPPSDMPQIKAKVAAMGALQGLRQDWGCRRAWARDYLSSATDNPTASSLFAQRLKTLRDKDGFGAVLFSSHVRKVNRFHKIRNRALLLTDQHLYKLDPDRQYRVMRAVPLEAVTGLSVTSGGDQLVVLHARGQDDLVVCLHRSRPPLDNRVGELVGVLAAHCQGEGRTLEVRVSDCIPLSHRGVRRLISVEPRPEQPEPDFRCARGSFTLLWPSR

SEQ ID NO: 127 - DNA, 3080 bp, Homo sapiens
  CDS (15)..(3053)
ttccagccggcaggatggaggacgaggaaggccctgagtatggcaaacctgactttgtgcttttggaccaagtgaccatggaggacttcatgaggaacctgcagctcaggttcgagaagggccgcatctacacctacatcggtgaggtgctggtgtccgtgaacccctaccaggagctgcccctgtatgggcctgaggccatcgccaggtaccagggccgtgagctctatgagcggccaccccatctctatgctgtggccaacgccgcctacaaggcaatgaagcaccggtccagggacacctgcatcgtcatctcaggggagagtggggcagggaagacagaagccagtaagcacatcatgcagtacatcgctgctgtcaccaatccaagccagagggctgaggtggagagggtcaaggacgtgctgctcaagtccacctgtgtgctggaggcctttggcaatgcccgcaccaaccgcaatcacaactccagccgctttggcaagtacatggacatcaactttgacttcaagggggacccgatcggaggacacatccacagctacctactggagaagtctcgggtcctcaagcagcacgtgggtgaaagaaacttccacgccttctaccaattgctgagaggcagtgaggacaagcagctgcatgaactgcacttggagagaaaccctgctgtatacaatttcacacaccagggagcaggactcaacatgactgtgagtgatgagcagagccaccaggcagtgaccgaggccatgagggtcatcggcttcagtcctgaagaggtggagtctgtgcatcgcatcctggctgccatattgcacctgggaaacatcgagtttgtggagacggaggagggtgggctgcagaaggagggcctggcagtggccgaggaggcactggtggaccatgtggctgagctgacggccacaccccgggacctcgtgctccgctccctgctggctcgcacagttgcctcgggaggcagggaactcatagagaagggccacactgcagctgaggccagctatgcccgggatgcctgtgccaaggcagtgtaccagcggctgtttgagtgggtggtgaacaggatcaacagtgtcatggaaccccggggccgggatcctcggcgtgatggcaaggacacagtcattggcgtgctggacatctatggcttcgaggtgtttcccgtcaacagtttcgagcagttctgcatcaactactgcaacgagaagctgcagcagctattcatccagctcatcctgaagcaggaacaggaagagtacgagcgcgagggcatcacctggcagagcgttgagtatttcaacaacgccaccattgtggatctggtggagcggccccaccgtggcatcctggccgtgctggacgaggcctgcagctctgctggcaccatcactgaccgaatcttcctgcagaccctggacatgcaccaccgccatcacctacactacaccagccgccagctctgccccacagacaagaccatggagtttggccgagacttccggatcaagcactatgcaggggacgtcacgtactccgtggaaggcttcatcgacaagaacagagatttcctcttccaggacttcaagcggctgctgtacaacagcacggaccccactctacgggccatgtggccggacgggcagcaggacatcacagaggtgaccaagcgccccctgacggctggcacactcttcaagaactccatggtggccctggtggagaaccttgcctccaaggagcccttctacgtccgctgcatcaagcccaatgaggacaaggtagctgggaagctggatgagaaccactgtcgccaccaggtcgcatacctggggctgctggagaatgtgagggtccgcagggctggcttcgcttcccgccagccctactctcgattcctgctcaggtacaagatgacctgtgaatacacatggcccaaccacctgctgggctccgacaaggcagccgtgagcgctctcctggagcagcacgggctgcagggggacgtggcctttggccacagcaagctgttcatccgctcaccccggacactggtcacactggagcagagccgagcccgcctcatccccatcattgtgctgctattgcagaaggcatggcggggcaccttggcgaggtggcgctgccggaggctgagggctatctacaccatcatgcgctggttccggagacacaaggtgcgggctcacctggctgagctgcagcggcgattccaggctgcaaggcagccgccactctacgggcgtgaccttgtgtggccgctgccccctgctgtgctgcagcccttccaggacacctgccacgcactcttctgcaggtggcgggcccggcagctggtgaagaacatccccccttcagacatgccccagatcaaggccaaggtggccgccatgggggccctgcaagggcttcgtcaggactggggctgccgacgggcctgggcccgagactacctgtcctctgccactgacaatcccacagcatcaagcctgtttgctcagcgactaaagacacttcaggacaaagatggcttcggggctgtgctcttttcaagccatgtccgcaaggtgaaccgcttccacaagatccggaaccgggccctcctgctcacagaccagcacctctacaagctggaccctgaccggcagtaccgggtgatgcgggccgtgccccttgaggcggtgacggggctgagcgtgaccagcggaggagaccagctggtggtgctgcacgcccgcggccaggacgacctcgtggtgtgcctgcaccgctcccggccgccattggacaaccgcgttggggagctggtgggcgtgctggccgcacactgccgcagggagggccgcaccctggaggttcgcgtctccgactgcatcccactaagccatcgcggggtccggcgcctcatctccgtggagcccaggccggagcagccagagcccgatttccgctgcgctcgcggctccttcaccctgctctggcccagccgctgagcgcccgcacccgccgcaccccga

SEQ ID NO: 128 - protein, 1013 aa, Homo sapiens
MEDEEGPEYGKPDFVLLDQVTMEDFMRNLQLRFEKGRIYTYIGEVLVSVNPYQELPLYGPEAIARYQGRELYERPPHLYAVANAAYKAMKHRSRDTCIVISGESGAGKTEASKHIMQYIAAVTNPSQRAEVERVKDVLLKSTCVLEAFGNARTNRNHNSSRFGKYMDINFDFKGDPIGGHIHSYLLEKSRVLKQHVGERNFHAFYQLLRGSEDKQLHELHLERNPAVYNFTHQGAGLNMTVSDEQSHQAVTEAMRVIGFSPEEVESVHRILAAILHLGNIEFVETEEGGLQKEGLAVAEEALVDHVAELTATPRDLVLRSLLARTVASGGRELIEKGHTAAEASYARDACAKAVYQRLFEWVVNRINSVMEPRGRDPRRDGKDTVIGVLDIYGFEVFPVNSFEQFCINYCNEKLQQLFIQLILKQEQEEYEREGITWQSVEYFNNATIVDLVERPHRGILAVLDEACSSAGTITDRIFLQTLDMHHRHHLHYTSRQLCPTDKTMEFGRDFRIKHYAGDVTYSVEGFIDKNRDFLFQDFKRLLYNSTDPTLRAMWPDGQQDITEVTKRPLTAGTLFKNSMVALVENLASKEPFYVRCIKPNEDKVAGKLDENHCRHQVAYLGLLENVRVRRAGFASRQPYSRFLLRYKMTCEYTWPNHLLGSDKAAVSALLEQHGLQGDVAFGHSKLFIRSPRTLVTLEQSRARLIPIIVLLLQKAWRGTLARWRCRRLRAIYTIMRWFRRHKVRAHLAELQRRFQAARQPPLYGRDLVWPLPPAVLQPFQDTCHALFCRWRARQLVKNIPPSDMPQIKAKVAAMGALQGLRQDWGCRRAWARDYLSSATDNPTASSLFAQRLKTLQDKDGFGAVLFSSHVRKVNRFHKIRNRALLLTDQHLYKLDPDRQYRVMRAVPLEAVTGLSVTSGGDQLVVLHARGQDDLVVCLHRSRPPLDNRVGELVGVLAAHCRREGRTLEVRVSDCIPLSHRGVRRLISVEPRPEQPEPDFRCARGSFTLLWPSR

SEQ ID NO: 129 - DNA, 1187 bp, Homo sapiens
  CDS (124)..(1086)
ggcagagttcctctatctcgtcttgttgtggcagagttcctctatctcgtcttgttgctgattaaaggtgcccctgtctccagtttttctccatctcctgggacgtagcaggaaatcagcatcatggttgggttcaaggccacagatgtgccccctactgccactgtgaagtttcttggggctggcacagctgcctgcatcgcagatctcatcacctttcctctggatactgctaaagtccggttacagatccaaggagaaagtcaggggccagtgcgcgctacagccagcgcccatcacaccgcggtactgggcgctggctgtagcgcgcagtaccgcggtgtgatgggcaccattctgaccatggtgcgtactgagggcccccgaagcctctacaatgggctggttgccggcctgcagcgccaaatgagctttgcctctgtccgcatcggcctgtatgattctgtcaaacagttctacaccaagggctctgagcatgccagcattgggagccgcctcctagcaggcagcaccacaggtgccctggctgtggctgtggcccagcccacggatgtggtaaaggtccgattccaagctcaggcccgggctggaggtggtcggagataccaaagcaccgtcaatgcctacaagaccattgcccgagaggaagggttccggggcctctggaaagggacctctcccaatgttgctcgtaatgccattgtcaactgtgctgagctggtgacctatgacctcatcaaggatgccctcctgaaagccaacctcatgacagatgacctcccttgccacttcacttctgcctttggggcaggcttctgcaccactgtcatcgcctcccctgtagacgtggtcaagacgagatacatgaactctgccctgggccagtacagtagcgctggccactgtgcccttaccatgctccagaaggaggggccccgagccttctacaaagggttcatgccctcctttctccgcttgggttcctggaacgtggtgatgttcgtcacctatgagcagctgaaacgagccctcatggctgcctgcacttcccgagaggctcccttctgagcctctcctgctgctgacctgatcacctctggctttgtctctagccgggccatgctttccttttcttccttctttctcttccctccttcccttctctc

SEQ ID NO: 130 - protein, 321 aa, Homo sapiens
MVGFKATDVPPTATVKFLGAGTAACIADLITFPLDTAKVRLQIQGESQGPVRATASAHHTAVLGAGCSAQYRGVMGTILTMVRTEGPRSLYNGLVAGLQRQMSFASVRIGLYDSVKQFYTKGSEHASIGSRLLAGSTTGALAVAVAQPTDVVKVRFQAQARAGGGRRYQSTVNAYKTIAREEGFRGLWKGTSPNVARNAIVNCAELVTYDLIKDALLKANLMTDDLPCHFTSAFGAGFCTTVIASPVDVVKTRYMNSALGQYSSAGHCALTMLQKEGPRAFYKGFMPSFLRLGSWNVVMFVTYEQLKRALMAACTSREAPF

SEQ ID NO: 131 - DNA, 960 bp, Homo sapiens
  CDS (15)..(941)
aggaaatcagcatcatggttgggttcaaggccacagatgtgccccctactgccactgtgaagtttcttggggctggcacagctgcctgcatcgcagatctcatcacctttcctctggatactgctaaagtccggttacagatccaaggagaaagtcaggggccagtgcgcgctacagccagcgcccagtaccgcggtgtgatgggcaccattctgaccatggtgcgtactgagggcccccgaagcctctacaatgggctggttgccggcctgcagcgccaaatgagctttgcctctgtccgcatcggcctgtatgattctgtcaaacagttctacaccaagggctctgagcatgccagcattgggagccgcctcctagcaggcagcaccacaggtgccctggctgtggctgtggcccagcccacggatgtggtaaaggtccgattccaagctcaggcccgggctggaggtggtcggagataccaaagcaccgtcaatgcctacaagaccattgcccgagaggaagggttccggggcctctggaaagggacctctcccaatgttgctcgtaatgccattgtcaactgtgctgagctggtgacctatgacctcatcaaggatgccctcctgaaagccaacctcatgacagatgacctcccttgccacttcacttctgcctttggggcaggcttctgcaccactgtcatcgcctcccctgtagacgtggtcaagacgagatacatgaactctgccctgggccagtacagtagcgctggccactgtgcccttaccatgctccagaaggaggggccccgagccttctacaaagggttcatgccctcctttctccgcttgggttcctggaacgtggtgatgttcgtcacctatgagcagctgaaacgagccctcatggctgcctgcacttcccgagaggctcccttctgagcctctcctgctgctg

SEQ ID NO: 132 - protein, 309 aa, Homo sapiens
MVGFKATDVPPTATVKFLGAGTAACIADLITFPLDTAKVRLQIQGESQGPVRATASAQYRGVMGTILTMVRTEGPRSLYNGLVAGLQRQMSFASVRIGLYDSVKQFYTKGSEHASIGSRLLAGSTTGALAVAVAQPTDVVKVRFQAQARAGGGRRYQSTVNAYKTIAREEGFRGLWKGTSPNVARNAIVNCAELVTYDLIKDALLKANLMTDDLPCHFTSAFGAGFCTTVIASPVDVVKTRYMNSALGQYSSAGHCALTMLQKEGPRAFYKGFMPSFLRLGSWNVVMFVTYEQLKRALMAACTSREAPF

SEQ ID NO: 133 - DNA, 20 bp, Artificial Sequence
  Description of Artifical Sequence:  Primer/Probe
cagaccagtgagcagttcct

SEQ ID NO: 134 - DNA, 24 bp, Artificial Sequence
  Description of Artifical Sequence:  Primer/Probe
tccccttcttgtctccatccagct

SEQ ID NO: 135 - DNA, 22 bp, Artificial Sequence
  Description of Artifical Sequence:  Primer/Probe
cttgtttcttgatcttggagcc

SEQ ID NO: 136 - DNA, 23 bp, Artificial Sequence
  Description of Artifical Sequence:  Primer/Probe
tgctaccatttccttacgtctct

SEQ ID NO: 137 - DNA, 23 bp, Artificial Sequence
  Description of Artifical Sequence:  Primer/Probe
tcttcgctcagcgatgcaaaacg

SEQ ID NO: 138 - DNA, 17 bp, Artificial Sequence
  Description of Artifical Sequence:  Primer/Probe
cctggcccggagagtac

SEQ ID NO: 139 - DNA, 22 bp, Artificial Sequence
  Description of Artifical Sequence:  Primer/Probe
ctgtcacagatgcctgttctct

SEQ ID NO: 140 - DNA, 30 bp, Artificial Sequence
  Description of Artifical Sequence:  Primer/Probe
tcagccagatattgacttattaccatttgg

SEQ ID NO: 141 - DNA, 22 bp, Artificial Sequence
  Description of Artifical Sequence:  Primer/Probe
cctctctccaatttcagtttga

SEQ ID NO: 142 - DNA, 22 bp, Artificial Sequence
  Description of Artifical Sequence:  Primer/Probe
ttcttgggagtttagcctttgt

SEQ ID NO: 143 - DNA, 29 bp, Artificial Sequence
  Description of Artifical Sequence:  Primer/Probe
ttgcttggatatcttccacagtaactccc

SEQ ID NO: 144 - DNA, 22 bp, Artificial Sequence
  Description of Artifical Sequence:  Primer/Probe
ggccaagaaattaaccaacatt

SEQ ID NO: 145 - DNA, 21 bp, Artificial Sequence
  Description of Artifical Sequence:  Primer/Probe
tgtattcatgggactcaccaa

SEQ ID NO: 146 - DNA, 26 bp, Artificial Sequence
  Description of Artifical Sequence:  Primer/Probe
ttcacgggagattcagcttctacttt

SEQ ID NO: 147 - DNA, 22 bp, Artificial Sequence
  Description of Artifical Sequence:  Primer/Probe
gctcgcaaagtagaacaacaaa

SEQ ID NO: 148 - DNA, 28 bp, Artificial Sequence
  Description of Artifical Sequence:  Primer/Probe
acagtacatcagaagtgaaatcatatgt

SEQ ID NO: 149 - DNA, 26 bp, Artificial Sequence
  Description of Artifical Sequence:  Primer/Probe
tccatgctattgacagcaattcatgc

SEQ ID NO: 150 - DNA, 30 bp, Artificial Sequence
  Description of Artifical Sequence:  Primer/Probe
gctagcagacatatggttaaagtaagatac

SEQ ID NO: 151 - DNA, 27 bp, Artificial Sequence
  Description of Artifical Sequence:  Primer/Probe
gaagacttcaccattttcataaagaac

SEQ ID NO: 152 - DNA, 26 bp, Artificial Sequence
  Description of Artifical Sequence:  Primer/Probe
tttcaacttctccaaccgtctggaca

SEQ ID NO: 153 - DNA, 21 bp, Artificial Sequence
  Description of Artifical Sequence:  Primer/Probe
cggaggagacagactttgaaa

SEQ ID NO: 154 - DNA, 18 bp, Artificial Sequence
  Description of Artifical Sequence:  Primer/Probe
atgggtgctggtgctttc

SEQ ID NO: 155 - DNA, 27 bp, Artificial Sequence
  Description of Artifical Sequence:  Primer/Probe
ttctgcgacctggtactcatctacctc

SEQ ID NO: 156 - DNA, 27 bp, Artificial Sequence
  Description of Artifical Sequence:  Primer/Probe
gtacttcttgtcacggtaaaactctct

SEQ ID NO: 157 - DNA, 20 bp, Artificial Sequence
  Description of Artifical Sequence:  Primer/Probe
tgaatggcgttaaggtcctg

SEQ ID NO: 158 - DNA, 29 bp, Artificial Sequence
  Description of Artifical Sequence:  Primer/Probe
tttctgtagctcgcacaccagctctgtct

SEQ ID NO: 159 - DNA, 21 bp, Artificial Sequence
  Description of Artifical Sequence:  Primer/Probe
gtgagaccactgaggcttctg

SEQ ID NO: 160 - DNA, 25 bp, Artificial Sequence
  Description of Artifical Sequence:  Primer/Probe
gaagttctctcattcaactcttcgt

SEQ ID NO: 161 - DNA, 32 bp, Artificial Sequence
  Description of Artifical Sequence:  Primer/Probe
tcgaggcctagaaatctgtctgaacagtcaag

SEQ ID NO: 162 - DNA, 30 bp, Artificial Sequence
  Description of Artifical Sequence:  Primer/Probe
ccaatgatataaaataagtactcttcatca

SEQ ID NO: 163 - DNA, 23 bp, Artificial Sequence
  Description of Artifical Sequence:  Primer/Probe
agcttcatgacgtaaccaatctt

SEQ ID NO: 164 - DNA, 25 bp, Artificial Sequence
  Description of Artifical Sequence:  Primer/Probe
tctacccctactcacatccgggtgg

SEQ ID NO: 165 - DNA, 22 bp, Artificial Sequence
  Description of Artifical Sequence:  Primer/Probe
gtttctccaggccttcatagag

SEQ ID NO: 166 - DNA, 27 bp, Artificial Sequence
  Description of Artifical Sequence:  Primer/Probe
gacagaacatcaggaatatggattaat

SEQ ID NO: 167 - DNA, 26 bp, Artificial Sequence
  Description of Artifical Sequence:  Primer/Probe
tcatagatggctccacattgtcactc

SEQ ID NO: 168 - DNA, 32 bp, Artificial Sequence
  Description of Artifical Sequence:  Primer/Probe
gtaattgtttgaactagagtcttgactagaat

SEQ ID NO: 169 - DNA, 20 bp, Artificial Sequence
  Description of Artifical Sequence:  Primer/Probe
cacacgcacagtgtttgttg

SEQ ID NO: 170 - DNA, 30 bp, Artificial Sequence
  Description of Artifical Sequence:  Primer/Probe
ttcatccagtttcggaaacagaagcttaca

SEQ ID NO: 171 - DNA, 32 bp, Artificial Sequence
  Description of Artifical Sequence:  Primer/Probe
attccaaagtgtatacttagatgagactattc

SEQ ID NO: 172 - DNA, 20 bp, Artificial Sequence
  Description of Artifical Sequence:  Primer/Probe
tttgttggcaatcatccagt

SEQ ID NO: 173 - DNA, 30 bp, Artificial Sequence
  Description of Artifical Sequence:  Primer/Probe
ttcacaaaatctttgtgcaatgtaagcttc

SEQ ID NO: 174 - DNA, 29 bp, Artificial Sequence
  Description of Artifical Sequence:  Primer/Probe
aaattccaaagtgtatacttagatgagac

SEQ ID NO: 175 - DNA, 22 bp, Artificial Sequence
  Description of Artifical Sequence:  Primer/Probe
catagctgacacccacctacat

SEQ ID NO: 176 - DNA, 26 bp, Artificial Sequence
  Description of Artifical Sequence:  Primer/Probe
tcacccatgtacttcttcctgggcaa

SEQ ID NO: 177 - DNA, 22 bp, Artificial Sequence
  Description of Artifical Sequence:  Primer/Probe
ctgcagtcatggttaccaagat

SEQ ID NO: 178 - DNA, 22 bp, Artificial Sequence
  Description of Artifical Sequence:  Primer/Probe
catagctgacacccacctacat

SEQ ID NO: 179 - DNA, 26 bp, Artificial Sequence
  Description of Artifical Sequence:  Primer/Probe
tcacccatgtacttcttcctgggcaa

SEQ ID NO: 180 - DNA, 22 bp, Artificial Sequence
  Description of Artifical Sequence:  Primer/Probe
ctgcagtcatggttaccaagat

SEQ ID NO: 181 - DNA, 22 bp, Artificial Sequence
  Description of Artifical Sequence:  Primer/Probe
atgggaaacaccatcatcatag

SEQ ID NO: 182 - DNA, 26 bp, Artificial Sequence
  Description of Artifical Sequence:  Primer/Probe
ttggtcatagctgacacccacctaca

SEQ ID NO: 183 - DNA, 22 bp, Artificial Sequence
  Description of Artifical Sequence:  Primer/Probe
aattgcccaggaagaagtacat

SEQ ID NO: 184 - DNA, 22 bp, Artificial Sequence
  Description of Artifical Sequence:  Primer/Probe
catagctgacacccacctacat

SEQ ID NO: 185 - DNA, 26 bp, Artificial Sequence
  Description of Artifical Sequence:  Primer/Probe
tcacccatgtacttcttcctgggcaa

SEQ ID NO: 186 - DNA, 22 bp, Artificial Sequence
  Description of Artifical Sequence:  Primer/Probe
actgcagtcatggttaccaaga

SEQ ID NO: 187 - DNA, 22 bp, Artificial Sequence
  Description of Artifical Sequence:  Primer/Probe
gtctcacctcacactggtcttc

SEQ ID NO: 188 - DNA, 26 bp, Artificial Sequence
  Description of Artifical Sequence:  Primer/Probe
tcatctttctgtatgtcaggcctggc

SEQ ID NO: 189 - DNA, 22 bp, Artificial Sequence
  Description of Artifical Sequence:  Primer/Probe
ctgacttgcacagagtgagctt

SEQ ID NO: 190 - DNA, 20 bp, Artificial Sequence
  Description of Artifical Sequence:  Primer/Probe
cagggtcgaatctggaatgg

SEQ ID NO: 191 - DNA, 25 bp, Artificial Sequence
  Description of Artifical Sequence:  Primer/Probe
ttctggcttcagctatcagggcacc

SEQ ID NO: 192 - DNA, 19 bp, Artificial Sequence
  Description of Artifical Sequence:  Primer/Probe
cccgtcatccgtttccaat

SEQ ID NO: 193 - DNA, 20 bp, Artificial Sequence
  Description of Artifical Sequence:  Primer/Probe
gctccttctacttcgccatc

SEQ ID NO: 194 - DNA, 26 bp, Artificial Sequence
  Description of Artifical Sequence:  Primer/Probe
ttcatcactaccatcgagtacggcca

SEQ ID NO: 195 - DNA, 19 bp, Artificial Sequence
  Description of Artifical Sequence:  Primer/Probe
acatgcagaagaccttgcc

SEQ ID NO: 196 - DNA, 22 bp, Artificial Sequence
  Description of Artifical Sequence:  Primer/Probe
tgattgtctgtgtggataaacg

SEQ ID NO: 197 - DNA, 26 bp, Artificial Sequence
  Description of Artifical Sequence:  Primer/Probe
ttcttcctcagccacctctctaccct

SEQ ID NO: 198 - DNA, 22 bp, Artificial Sequence
  Description of Artifical Sequence:  Primer/Probe
ttatggttgtgaccaggatctc

SEQ ID NO: 199 - DNA, 22 bp, Artificial Sequence
  Description of Artifical Sequence:  Primer/Probe
cattgtgattgtctgtgtggat

SEQ ID NO: 200 - DNA, 26 bp, Artificial Sequence
  Description of Artifical Sequence:  Primer/Probe
ttcttcctcagccacctctctaccct

SEQ ID NO: 201 - DNA, 22 bp, Artificial Sequence
  Description of Artifical Sequence:  Primer/Probe
ttatggttgtgaccaggatctc

SEQ ID NO: 202 - DNA, 22 bp, Artificial Sequence
  Description of Artifical Sequence:  Primer/Probe
tgattgtctgtgtggataaacg

SEQ ID NO: 203 - DNA, 26 bp, Artificial Sequence
  Description of Artifical Sequence:  Primer/Probe
ttcttcctcagccacctctctaccct

SEQ ID NO: 204 - DNA, 22 bp, Artificial Sequence
  Description of Artifical Sequence:  Primer/Probe
ttatggttgtgaccaggatctc

SEQ ID NO: 205 - DNA, 22 bp, Artificial Sequence
  Description of Artifical Sequence:  Primer/Probe
ccaggagtttgtcaataaatgc

SEQ ID NO: 206 - DNA, 23 bp, Artificial Sequence
  Description of Artifical Sequence:  Primer/Probe
tctcatcaagaacccagcggagc

SEQ ID NO: 207 - DNA, 21 bp, Artificial Sequence
  Description of Artifical Sequence:  Primer/Probe
ttgatgaaggtgtggtttgtg

SEQ ID NO: 208 - DNA, 21 bp, Artificial Sequence
  Description of Artifical Sequence:  Primer/Probe
ctacatggctccacctcctaa

SEQ ID NO: 209 - DNA, 23 bp, Artificial Sequence
  Description of Artifical Sequence:  Primer/Probe
tccccgacttccaggagtttgtc

SEQ ID NO: 210 - DNA, 20 bp, Artificial Sequence
  Description of Artifical Sequence:  Primer/Probe
tgggttcttgatgaggcatt

SEQ ID NO: 211 - DNA, 22 bp, Artificial Sequence
  Description of Artifical Sequence:  Primer/Probe
ccaggagtttgtcaataaatgc

SEQ ID NO: 212 - DNA, 23 bp, Artificial Sequence
  Description of Artifical Sequence:  Primer/Probe
tctcatcaagaacccagcggagc

SEQ ID NO: 213 - DNA, 21 bp, Artificial Sequence
  Description of Artifical Sequence:  Primer/Probe
ttgatgaaggtgtggtttgtg

SEQ ID NO: 214 - DNA, 23 bp, Artificial Sequence
  Description of Artifical Sequence:  Primer/Probe
ccaacatcctcgtgaactctaga

SEQ ID NO: 215 - DNA, 23 bp, Artificial Sequence
  Description of Artifical Sequence:  Primer/Probe
taaccgctccggcccgaagtcac

SEQ ID NO: 216 - DNA, 19 bp, Artificial Sequence
  Description of Artifical Sequence:  Primer/Probe
gtccgactgcaccgagtaa

SEQ ID NO: 217 - DNA, 21 bp, Artificial Sequence
  Description of Artifical Sequence:  Primer/Probe
ggtgtggttgactctgaggat

SEQ ID NO: 218 - DNA, 26 bp, Artificial Sequence
  Description of Artifical Sequence:  Primer/Probe
ttgaacatctcccgagaaatgctcca

SEQ ID NO: 219 - DNA, 22 bp, Artificial Sequence
  Description of Artifical Sequence:  Primer/Probe
ttgcgaatgactttcaagattt

SEQ ID NO: 220 - DNA, 21 bp, Artificial Sequence
  Description of Artifical Sequence:  Primer/Probe
acccaagtggcatctattcag

SEQ ID NO: 221 - DNA, 26 bp, Artificial Sequence
  Description of Artifical Sequence:  Primer/Probe
ttcagccgcaattttcctattatcgg

SEQ ID NO: 222 - DNA, 22 bp, Artificial Sequence
  Description of Artifical Sequence:  Primer/Probe
gtgaagttgctcgaatgtcttc

SEQ ID NO: 223 - DNA, 22 bp, Artificial Sequence
  Description of Artifical Sequence:  Primer/Probe
cctactgccactgtgaagtttc

SEQ ID NO: 224 - DNA, 26 bp, Artificial Sequence
  Description of Artifical Sequence:  Primer/Probe
ttcgcagatctcatcacctttcctct

SEQ ID NO: 225 - DNA, 22 bp, Artificial Sequence
  Description of Artifical Sequence:  Primer/Probe
ggatctgtaaccggactttagc

SEQ ID NO: 226 - DNA, 22 bp, Artificial Sequence
  Description of Artifical Sequence:  Primer/Probe
gcccaatcctgatgactacttc

SEQ ID NO: 227 - DNA, 24 bp, Artificial Sequence
  Description of Artifical Sequence:  Primer/Probe
tctccaagctcggagctttgacct

SEQ ID NO: 228 - DNA, 22 bp, Artificial Sequence
  Description of Artifical Sequence:  Primer/Probe
ctcagcatgtcctctgatttct

SEQ ID NO: 229 - DNA, 7149 bp, WNK1
  CDS (1)..(7146)
atgtctggcggcgccgcagagaagcagagcagcactcccggttccctgttcctctcgccgccggctcctgcccccaagaatggctccagctccgattcctccgtgggggagaaactgggagccgcggccgccgacgctgtgaccggcaggaccgaggagtacaggcgccgccgccacactatggacaaggacagccgtggggcggccgcgaccactaccaccactgagcaccgcttcttccgccggagcgtcatctgcgactccaatgccactgcgctggagcttcccggccttcctctttccctgccccagcccagcatccccgcggctgtcccgcagagtgctccaccggagccccaccgggaagagaccgtgaccgccaccgccacttcccaggtagcccagcagcctccagccgctgccgcccctggggaacaggccgtcgcgggccctgccccctcgactgtccccagcagtaccagcaaagaccgcccagtgtcccagcctagccttgtggggagcaaagaggagccgccgccggcgagaagtggcagcggcggcggcagcgccaaggagccacaggaggaacggagccagcagcaggatgatatcgaagagctggagaccaaggccgtgggaatgtctaacgatggccgctttctcaagtttgacatcgaaatcggcagaggctcctttaagacggtctacaaaggtctggacactgaaaccaccgtggaagtcgcctggtgtgaactgcaggatcgaaaattaacaaagtctgagaggcagagatttaaagaagaagctgaaatgttaaaaggtcttcagcatcccaatattgttagattttatgattcctgggaatccacagtaaaaggaaagaagtgcattgttttggtgactgaacttatgacgtctggaacacttaaaacgtatctgaaaaggtttaaagtgatgaagatcaaagttctaagaagctggtgccgtcagatccttaaaggtcttcagtttcttcatactcgaactccacctatcattcaccgcgatcttaaatgtgacaacatctttatcaccggccctactggctcagtcaagattggagacctcggtctggcaaccctgaagcgggcttcttttgccaagagtgtgataggtaccccagagttcatggcccctgagatgtatgaggagaaatatgatgaatccgttgacgtttatgcctttgggatgtgcatgcttgagatggctacatctgaatatccttactcggagtgccaaaatgctgcgcagatctaccgtcgcgtgaccagtggggtgaagccagccagttttgacaaagtagcaattcctgaagtgaaggaaattattgaaggatgcatacgacaaaacaaagatgaaagatattccatcaaagaccttttgaaccatgccttcttccaagaggaaacaggagtacgggtagaattagcagaggaagatgatggagaaaaaatagccataaaattatggctacgtattgaagatattaagaaattaaagggaaaatacaaagataatgaagctattgagttttcttttgatttagagagagatgtcccagaagatgttgcacaagaaatggtagagtctgggtatgtctgtgaaggtgatcacaagaccatggctaaagctatcaaagacagagtatcattaattaagaggaaacgagagcagcggcagttggtacgggaggagcaagaaaaaaaaaagcaggaagagagcagtctcaaacagcaggtagaacaatccagtgcttcccagacaggaatcaagcagctcccttctgctagcaccggcatacctactgcttctaccacttcagcttcagtttctacacaagtagaacctgaagaacctgaggcagatcaacatcaacaactacagtaccagcaacccagtatatctgtgttatctgatgggacggttgacagtggtcagggatcctctgtcttcacagaatctcgagtgagcagccaacagacagtttcatatggttcccaacatgaacaggcacattctacaggcacagtcccagggcatataccttctactgtccaagcacagtctcagccccatggggtatatccaccctcaagtgtggcacaggggcagagccagggtcagccatcctcaagtagcttaacaggggtttcatcttcccaacccatacaacatcctcagcagcagcagggaatacagcagacagcccctcctcaacagacagtgcagtattcactttcacagacatcaacctccagtgaggccactactgcacagccagtgagtcagcctcaagctccacaagtcttgcctcaagtatcagctggaaaacagcttccagtttcccagccagtaccaactatccaaggcgaacctcagatcccagttgcgacacaaccctcggttgttccagtccactctggtgctcatttccttccagtgggacagccgctccctactcccttgctccctcagtaccctgtctctcagattcccatatcaactcctcatgtgtctacggctcagacaggtttctcatcccttcccatcacaatggcagctggcattactcagcctctgctcacgttggcttcatctgctacaacagctgcgatcccgggggtatcaactgtggttcctagtcagcttccaacccttctgcagcctgtgactcagctgccaagtcaggttcacccacagctcctacaaccagcagttcagtccatgggaataccagctaaccttggacaagctgctgaggttccactttcctctggagatgttctgtaccagggcttcccacctcgactgccaccacagtacccaggagattcaaatattgctccctcttccaacgtggcttctgtttgcatccattctacagtcctatcccctcccatgccgacagaagtactggctacacctgggtactttcccacagtggtgcagccttatgtggaatcaaatcttttagttcctatgggtggtgtaggaggacaggttcaagtgtcccagccaggagggagtttagcacaagcccccactacatcctcccagcaagcagttttggagagtactcagggagtctctcaggttgctcctgcagagccagttgcagtagcacagccccaagctacccagccgaccactttggcttcctctgtagacagtgcacattcagatgttgcttcaggtatgagtgatggcaatgagaacgtcccatcttccagtggaaggcatgaaggaagaactacaaaacggcattaccgaaaatctgtaaggagtcgctctcgacatgaaaaaacttcacgcccaaaattaagaattttgaatgtttcaaataaaggagaccgagtagtagaatgtcaattagagactcataataggaaaatggttacattcaaatttgacctagatggtgacaaccccgaggagatagcaacaattatggtgaacaatgactttattctagcaatagagagagagtcgtttgtggatcaagtgcgagaaattattgaaaaagctgatgaaatgctcagtgaggatgtcagtgtggaaccagagggtgatcagggattggagagtctacaaggaaaggatgactatggcttttcaggttctcagaaattggaaggagagttcaaacaaccaattcctgcgtcttccatgccacagcaaataggcattcctaccagttctttaactcaagttgttcattctgcgggaaggcggtttatagtgagtcctgtgccagaaagccgattacgagaatcaaaagttttccccagtgaaataacagatacagttgctgcctctacagctcagagccctggaatgaacttgtctcactctgcatcatcccttagtctacaacaggccttttctgaacttagacgtgcccaaatgacagaaggacccaacacagcacctccaaactttagtcatacaggaccaacatttccagtagtacctcctttcttaagtagcattgctggagtcccaaccacagcagcagccacagcaccagtccctgcaacaagcagccctcctaatgacatttccacatcagtaattcagtctgaggttacagtgcccactgaagaggggattgctggagttgccaccagcacaggtgtggtaacttcaggtggtctccccataccacctgtgtctgaatcaccagtactttccagcgtagtttcaagtatcacaatacctgcagttgtctcaatatctactacatccccgtcacttcaagtccccacatccacatctgagatcgttgtttctagtacagcactgtatccttcagtaacagtttcagcaacttcagcctctgcagggggcagtactgctaccccaggtcctaagcctccagctgtagtatctcagcaggcagcaggcagcactactgtgggagccacattaacatcagtttctaccaccacttcattcccaagcacagcttcacagctgtccattcagcttagcagcagtacttctactcctactttagctgaaaccgtggtagttagcgcacactcactagataagacatctcatagcagtacaactggattggctttctccctctctgcaccatcttcctcttcctctcctggagcaggagtgtctagttatatttctcagcctggtgggctgcatcctttggtcattccatcagtgatagcttctactcctattcttccccaagcagcaggacctacttctacacctttattaccccaagtacctagtatcccacccttggtacagcctgttgccaatgtgcctgctgtacagcagacactaattcatagtcagcctcaaccagctttgcttcccaaccagccccatactcattgtcctgaagtagattctgatacacaacccaaagctcctggaattgatgacataaagactctagaagaaaagctgcggtctctgttcagtgaacacagctcatctggagctcagcatgcctctgtctcactggagacctcactagtcatagagagcactgtcacaccaggcatcccaactactgctgttgcaccaagcaaactcctgacttctaccacaagtacttgcttaccaccaaccaatttaccactaggaacagttgctttgccagttacaccagtggtcacacctgggcaagtttctaccccagtcagcactactacatcaggagtgaaacctggaactgctccctccaagccacctctaactaaggctccggtgctgccagtgggtactgaacttccagcaggtactctacccagcgagcagctgccaccttttccaggaccttctctaacccagtcccagcaacctctagaggatcttgatgctcaattgagaagaacacttagtccagagattatcacagtgacttctgcggttggtcctgtgtccatggcggctccaacagcaatcacagaagcaggaacacagcctcagaagggtgtttctcaagtcaaagaaggccctgtcctagcaactagttcaggagctggtgtttttaagatgggacgatttcaggtttctgttgcagcagacggtgcccagaaagagggtaaaaataagtcagaagatgcaaagtctgttcattttgaatccagcacctcagagtcctcagtgctatcaagtagtagtccagagagtaccttggtgaaaccagagccgaatggcataaccatccctggtatctcttcagatgtgccagagagtgcccacaaaactactgcctcagaggcaaagtcagacactgggcagcctaccaaggttggacgttttcaggtgacaactacagcaaacaaagtgggtcgtttctctgtatcaaaaactgaggacaagatcactgacacaaagaaagaaggaccagtggcatctcctccttttatggatttggaacaagctgttcttcctgctgtgataccaaagaaagagaagcctgaactgtcagagccttcacatctaaatgggccgtcttctgacccggaggccgcttttttaagtagggatgtggatgatggttccggtagtccacactcgccccatcagctgagctcaaagagccttcctagccagaatctaagtcaaagccttagtaattcatttaactcctcttacatgagtagcgacaatgagtcagatatcgaagatgaagacttaaagttagagctgcgacgactacgagataaacatctcaaagagattcaggacctgcagagtcgccagaagcatgaaattgaatctttgtataccaaactgggcaaggtgccccctgctgttattattcccccagctgctcccctttcagggagaagacgacgacccactaaaagcaaaggcagcaaatctagtcgaagcagttccttggggaataaaagcccccagctttcaggtaacctgtctggtcagagtgcagcttcagtcttgcacccccagcagaccctccaccctcctggcaacatcccagagtccgggcagaatcagctgttacagccccttaagccatctccctccagtgacaacctctattcagccttcaccagtgatggtgccatttcagtaccaagcctttctgctccaggtcaaggaaccagcagcacaaacactgttggggcaacagtgaacagccaagccgcccaagctcagcctcctgccatgacgtccagcaggaagggcacattcacagatgacttgcacaagttggtagacaattgggcccgagatgccatgaatctctcaggcaggagaggaagcaaagggcacatgaattacgagggccctggaatggcaaggaagttctctgcacctgggcaactgtgcatctccatgacctcgaacctgggtggctctgcccccatctctgcagcatcagctacctctctaggtcacttcaccaagtctatgtgccccccacagcagtatggctttccagctaccccatttggcgctcaatggagtgggacgggtggcccagcaccacagccacttggccagttccaacctgtgggaactgcctccttgcagaatttcaacatcagcaatttgcagaaatccatcagcaaccccccaggctccaacctgcggaccacttag

SEQ ID NO: 230 - protein, 2382 aa, WNK1
MSGGAAEKQSSTPGSLFLSPPAPAPKNGSSSDSSVGEKLGAAAADAVTGRTEEYRRRRHTMDKDSRGAAATTTTTEHRFFRRSVICDSNATALELPGLPLSLPQPSIPAAVPQSAPPEPHREETVTATATSQVAQQPPAAAAPGEQAVAGPAPSTVPSSTSKDRPVSQPSLVGSKEEPPPARSGSGGGSAKEPQEERSQQQDDIEELETKAVGMSNDGRFLKFDIEIGRGSFKTVYKGLDTETTVEVAWCELQDRKLTKSERQRFKEEAEMLKGLQHPNIVRFYDSWESTVKGKKCIVLVTELMTSGTLKTYLKRFKVMKIKVLRSWCRQILKGLQFLHTRTPPIIHRDLKCDNIFITGPTGSVKIGDLGLATLKRASFAKSVIGTPEFMAPEMYEEKYDESVDVYAFGMCMLEMATSEYPYSECQNAAQIYRRVTSGVKPASFDKVAIPEVKEIIEGCIRQNKDERYSIKDLLNHAFFQEETGVRVELAEEDDGEKIAIKLWLRIEDIKKLKGKYKDNEAIEFSFDLERDVPEDVAQEMVESGYVCEGDHKTMAKAIKDRVSLIKRKREQRQLVREEQEKKKQEESSLKQQVEQSSASQTGIKQLPSASTGIPTASTTSASVSTQVEPEEPEADQHQQLQYQQPSISVLSDGTVDSGQGSSVFTESRVSSQQTVSYGSQHEQAHSTGTVPGHIPSTVQAQSQPHGVYPPSSVAQGQSQGQPSSSSLTGVSSSQPIQHPQQQQGIQQTAPPQQTVQYSLSQTSTSSEATTAQPVSQPQAPQVLPQVSAGKQLPVSQPVPTIQGEPQIPVATQPSVVPVHSGAHFLPVGQPLPTPLLPQYPVSQIPISTPHVSTAQTGFSSLPITMAAGITQPLLTLASSATTAAIPGVSTVVPSQLPTLLQPVTQLPSQVHPQLLQPAVQSMGIPANLGQAAEVPLSSGDVLYQGFPPRLPPQYPGDSNIAPSSNVASVCIHSTVLSPPMPTEVLATPGYFPTVVQPYVESNLLVPMGGVGGQVQVSQPGGSLAQAPTTSSQQAVLESTQGVSQVAPAEPVAVAQPQATQPTTLASSVDSAHSDVASGMSDGNENVPSSSGRHEGRTTKRHYRKSVRSRSRHEKTSRPKLRILNVSNKGDRVVECQLETHNRKMVTFKFDLDGDNPEEIATIMVNNDFILAIERESFVDQVREIIEKADEMLSEDVSVEPEGDQGLESLQGKDDYGFSGSQKLEGEFKQPIPASSMPQQIGIPTSSLTQVVHSAGRRFIVSPVPESRLRESKVFPSEITDTVAASTAQSPGMNLSHSASSLSLQQAFSELRRAQMTEGPNTAPPNFSHTGPTFPVVPPFLSSIAGVPTTAAATAPVPATSSPPNDISTSVIQSEVTVPTEEGIAGVATSTGVVTSGGLPIPPVSESPVLSSVVSSITIPAVVSISTTSPSLQVPTSTSEIVVSSTALYPSVTVSATSASAGGSTATPGPKPPAVVSQQAAGSTTVGATLTSVSTTTSFPSTASQLSIQLSSSTSTPTLAETVVVSAHSLDKTSHSSTTGLAFSLSAPSSSSSPGAGVSSYISQPGGLHPLVIPSVIASTPILPQAAGPTSTPLLPQVPSIPPLVQPVANVPAVQQTLIHSQPQPALLPNQPHTHCPEVDSDTQPKAPGIDDIKTLEEKLRSLFSEHSSSGAQHASVSLETSLVIESTVTPGIPTTAVAPSKLLTSTTSTCLPPTNLPLGTVALPVTPVVTPGQVSTPVSTTTSGVKPGTAPSKPPLTKAPVLPVGTELPAGTLPSEQLPPFPGPSLTQSQQPLEDLDAQLRRTLSPEIITVTSAVGPVSMAAPTAITEAGTQPQKGVSQVKEGPVLATSSGAGVFKMGRFQVSVAADGAQKEGKNKSEDAKSVHFESSTSESSVLSSSSPESTLVKPEPNGITIPGISSDVPESAHKTTASEAKSDTGQPTKVGRFQVTTTANKVGRFSVSKTEDKITDTKKEGPVASPPFMDLEQAVLPAVIPKKEKPELSEPSHLNGPSSDPEAAFLSRDVDDGSGSPHSPHQLSSKSLPSQNLSQSLSNSFNSSYMSSDNESDIEDEDLKLELRRLRDKHLKEIQDLQSRQKHEIESLYTKLGKVPPAVIIPPAAPLSGRRRRPTKSKGSKSSRSSSLGNKSPQLSGNLSGQSAASVLHPQQTLHPPGNIPESGQNQLLQPLKPSPSSDNLYSAFTSDGAISVPSLSAPGQGTSSTNTVGATVNSQAAQAQPPAMTSSRKGTFTDDLHKLVDNWARDAMNLSGRRGSKGHMNYEGPGMARKFSAPGQLCISMTSNLGGSAPISAASATSLGHFTKSMCPPQQYGFPATPFGAQWSGTGGPAPQPLGQFQPVGTASLQNFNISNLQKSISNPPGSNLRTT

What is claimed is:

1. An isolated polypeptide comprising the mature form of an amino acid sequenced selected from the group consisting of SEQ ID NO:2n, wherein n is an integer between 1 and 66.

2. An isolated polypeptide comprising an amino acid sequence selected from the group consisting of SEQ ID NO:2n, wherein n is an integer between 1 and 66.

3. An isolated polypeptide comprising an amino acid sequence which is at least 95% identical to an amino acid sequence selected from the group consisting of SEQ ID NO:2n, wherein n is an integer between 1 and 66.

4. An isolated polypeptide, wherein the polypeptide comprises an amino acid sequence comprising one or more conservative substitutions in the amino acid sequence selected from the group consisting of SEQ ID NO:2n, wherein n is an integer between 1 and 66.

5. The polypeptide of claim 1 wherein said polypeptide is naturally occurring.

6. A composition comprising the polypeptide of claim 1 and a carrier.

7. A kit comprising, in one or more containers, the composition of claim 6.

8. The use of a therapeutic in the manufacture of a medicament for treating a syndrome associated with a human disease, the disease selected from a pathology associated with the polypeptide of claim 1, wherein the therapeutic comprises the polypeptide of claim 1.

9. A method for determining the presence or amount of the polypeptide of claim 1 in a sample, the method comprising:
(a) providing said sample;
(b) introducing said sample to an antibody that binds immunospecifically to the polypeptide; and
(c) determining the presence or amount of antibody bound to said polypeptide,
thereby determining the presence or amount of polypeptide in said sample.

10. A method for determining the presence of or predisposition to a disease associated with altered levels of expression of the polypeptide of claim 1 in a first mammalian subject, the method comprising:
a) measuring the level of expression of the polypeptide in a sample from the first mammalian subject; and
b) comparing the expression of said polypeptide in the sample of step (a) to the expression of the polypeptide present in a control sample from a second mammalian subject known not to have, or not to be predisposed to, said disease,
wherein an alteration in the level of expression of the polypeptide in the first subject as compared to the control sample indicates the presence of or predisposition to said disease.

11. A method of identifying an agent that binds to the polypeptide of claim 1, the method comprising:
(a) introducing said polypeptide to said agent; and
(b) determining whether said agent binds to said polypeptide.

12. The method of claim 11 wherein the agent is a cellular receptor or a downstream effector.

13. A method for identifying a potential therapeutic agent for use in treatment of a pathology, wherein the pathology is related to aberrant expression or aberrant physiological interactions of the polypeptide of claim 1, the method comprising:
(a) providing a cell expressing the polypeptide of claim 1 and having a property or function ascribable to the polypeptide;
(b) contacting the cell with a composition comprising a candidate substance; and
(c) determining whether the substance alters the property or function ascribable to the polypeptide;
whereby, if an alteration observed in the presence of the substance is not observed when the cell is contacted with a composition in the absence of the substance, the substance is identified as a potential therapeutic agent.

14. A method for screening for a modulator of activity of or of latency or predisposition to a pathology associated with the polypeptide of claim 1, said method comprising:
(a) administering a test compound to a test animal at increased risk for a pathology associated with the polypeptide of claim 1, wherein said test animal recombinantly expresses the polypeptide of claim 1;
(b) measuring the activity of said polypeptide in said test animal after administering the compound of step (a); and
(c) comparing the activity of said polypeptide in said test animal with the activity of said polypeptide in a control animal not administered said polypeptide, wherein a change in the activity of said polypeptide in said test animal relative to said control animal indicates the test compound is a modulator activity of or latency or predisposition to, a pathology associated with the polypeptide of claim 1.

15. The method of claim 14, wherein said test animal is a recombinant test animal that expresses a test protein transgene or expresses said transgene under the control of a promoter at an increased level relative to a wild-type test animal, and wherein said promoter is not the native gene promoter of said transgene.

16. A method for modulating the activity of the polypeptide of claim 1, the method comprising contacting a cell sample expressing the polypeptide of claim 1 with a compound that binds to said polypeptide in an amount sufficient to modulate the activity of the polypeptide.

17. A method of treating or preventing a pathology associated with the polypeptide of claim 1, the method comprising administering the polypeptide of claim 1 to a subject in which such treatment or prevention is desired in an amount sufficient to treat or prevent the pathology in the subject.

18. The method of claim 17, wherein the subject is a human.

19. A method of treating a pathological state in a mammal, the method comprising administering to the mammal a polypeptide in an amount that is sufficient to alleviate the pathological state, wherein the polypeptide is a polypeptide having an amino acid sequence at least 95% identical to a polypeptide comprising the amino acid sequence selected from the group consisting of SEQ ID NO:2n, wherein n is an integer between 1 and 66 or a biologically active fragment thereof.

20. An isolated nucleic acid molecule comprising a nucleic acid sequence selected from the group consisting of SEQ ID NO:2n-1, wherein n is an integer between 1 and 66.

21. The nucleic acid molecule of claim 20, wherein the nucleic acid molecule is naturally occurring.

22. A nucleic acid molecule, wherein the nucleic acid molecule differs by a single nucleotide from a nucleic acid sequence selected from the group consisting of SEQ ID NO: 2n-1, wherein n is an integer between 1 and 66.

23. An isolated nucleic acid molecule encoding the mature form of a polypeptide having an amino acid sequence selected from the group consisting of SEQ ID NO:2n, wherein n is an integer between 1 and 66.

24. An isolated nucleic acid molecule comprising a nucleic acid selected from the group consisting of 2n-1, wherein n is an integer between 1 and 66.

25. The nucleic acid molecule of claim 20, wherein said nucleic acid molecule hybridizes under stringent conditions to the nucleotide sequence selected from the group consisting of SEQ ID NO: 2n-1, wherein n is an integer between 1 and 66, or a complement of said nucleotide sequence.

26. A vector comprising the nucleic acid molecule of claim 20.

27. The vector of claim 26, further comprising a promoter operably linked to said nucleic acid molecule.

28. A cell comprising the vector of claim 26.

29. An antibody that immunospecifically binds to the polypeptide of claim 1.

30. The antibody of claim 29, wherein the antibody is a monoclonal antibody.

31. The antibody of claim 29, wherein the antibody is a humanized antibody.

32. A method for determining the presence or amount of the nucleic acid molecule of claim 20 in a sample, the method comprising:
(a) providing said sample;
(b) introducing said sample to a probe that binds to said nucleic acid molecule; and
(c) determining the presence or amount of said probe bound to said nucleic acid molecule,
thereby determining the presence or amount of the nucleic acid molecule in said sample.

33. The method of claim 32 wherein presence or amount of the nucleic acid molecule is used as a marker for cell or tissue type.

34. The method of claim 33 wherein the cell or tissue type is cancerous.

35. A method for determining the presence of or predisposition to a disease associated with altered levels of expression of the nucleic acid molecule of claim 20 in a first mammalian subject, the method comprising:
a) measuring the level of expression of the nucleic acid in a sample from the first mammalian subject; and
b) comparing the level of expression of said nucleic acid in the sample of step (a) to the level of expression of the nucleic acid present in a control sample from a second mammalian subject known not to have or not be predisposed to, the disease;
wherein an alteration in the level of expression of the nucleic acid in the first subject as compared to the control sample indicates the presence of or predisposition to the disease.

36. A method of producing the polypeptide of claim 1, the method comprising culturing a cell under conditions that lead to expression of the polypeptide, wherein said cell comprises a vector comprising an isolated nucleic acid molecule comprising a nucleic acid sequence selected from the group consisting of SEQ ID NO:2n-1, wherein n is an integer between 1 and 66.

37. The method of claim 36 wherein the cell is a bacterial cell.

38. The method of claim 36 wherein the cell is an insect cell.

39. The method of claim 36 wherein the cell is a yeast cell.

40. The method of claim 36 wherein the cell is a mammalian cell.

41. A method of producing the polypeptide of claim 2, the method comprising culturing a cell under conditions that lead to expression of the polypeptide, wherein said cell comprises a vector comprising an isolated nucleic acid molecule comprising a nucleic acid sequence selected from the group consisting of SEQ ID NO:2n-1, wherein n is an integer between 1 and 66.

42. The method of claim 41 wherein the cell is a bacterial cell.

43. The method of claim 41 wherein the cell is an insect cell.

44. The method of claim 41 wherein the cell is a yeast cell.

45. The method of claim 41 wherein the cell is a mammalian cell.
